United States Patent Application Publication US 2026/0297590 A1, published October 1, 2026 (application 19/420,912).

The application's sequence listing, which the Patent Office published only in electronic form, follows.

SEQUENCE LISTING (584 sequences)

SEQ ID NO: 1 - protein, 6 aa, synthetic construct
  VARIANT 2: note = Arg, D-Arg, Pro, D-Pro, L-Hydroxyproline, or D-Hydroxyproline
  VARIANT 5: note = Arg, D-Arg, or N omega-methyl-L-arginine
GXIDXI

SEQ ID NO: 2 - protein, 6 aa, synthetic construct
GRIDRI

SEQ ID NO: 3 - protein, 10 aa, synthetic construct
  VARIANT 2: note = Gly, D-Gly, Ala, D-Ala, Pro, D-Pro, L-Hydroxyproline, D-Hydroxyproline Ser, D-Ser, Cys, or D-Cys
  VARIANT 3: note = Phe, D-Phe, or Beta-cyclohexyl-L-alanine
  VARIANT 4: note = Gly, D-Gly, Ala, D-Ala, Ser, or D-Ser
  VARIANT 6: note = Arg, D-Arg, Pro, D-Pro, L-Hydroxyproline or D-Hydroxyproline
  VARIANT 9: note = Arg, D-Arg, or N omega-methyl-L-arginine
SXXXGXIDXI

SEQ ID NO: 4 - protein, 10 aa, synthetic construct
SCFGGRIDRI

SEQ ID NO: 5 - protein, 10 aa, synthetic construct
FGGRIDRIGA

SEQ ID NO: 6 - protein, 12 aa, synthetic construct
  VARIANT 4: note = Ser, D-Ser, Cys, or D-Cys
RSSXFGGRIDRI

SEQ ID NO: 7 - protein, 14 aa, synthetic construct
  VARIANT 4: note = Ser, D-Ser, Cys, or D-Cys
RSSXFGGRIDRIGA

SEQ ID NO: 8 - protein, 9 aa, synthetic construct
  VARIANT 1: note = Pro, D-Pro, L-Hydroxyproline, D-Hydroxyproline, Gly, D-Gly, Cys, D-Cys, Ala, or D-Ala
  SITE 2: note = Beta-cyclohexyl-L-alanine
  VARIANT 3: note = Ala, D-Ala, Ser, D-Ser, Gly, or D-Gly
  VARIANT 5: note = Pro, D-Pro, L-Hydroxyproline, Arg, or D-Arg
  VARIANT 8: note = Arg, D-Arg, or N omega-methyl-L-arginine
XXXGXIDXI

SEQ ID NO: 9 - protein, 11 aa, synthetic construct
  SITE 1: note = D-Phenylalanine
  SITE 3: note = D-Proline
  SITE 4: note = Beta-cyclohexyl-L-alanine
  SITE 5: note = D-Alanine
FSPXAGPIDRI

SEQ ID NO: 10 - protein, 28 aa, synthetic construct
  SITE 28: note = Amidated residue
  SITE 7..23: note = Intrachain disulfide bridge
SLRRSSCFGGRIDRIGAQSGLGCNSFRY

SEQ ID NO: 11 - protein, 20 aa, synthetic construct
  SITE 20: note = Amidated residue
  SITE 4..20: note = Intrachain disulfide bridge
RSSCFGGRIDRIGAQSGLGC

SEQ ID NO: 12 - protein, 20 aa, synthetic construct
  SITE 20: note = Amidated residue
RSSCFGGRIDRIGAQSGLGC

SEQ ID NO: 13 - protein, 20 aa, synthetic construct
  SITE 20: note = Amidated residue
RSSSFGGRIDRIGAQSGLGS

SEQ ID NO: 14 - protein, 20 aa, synthetic construct
  SITE 4..20: note = Intrachain disulfide bridge
RSSCFGGRIDRIGAQSGLGC

SEQ ID NO: 15 - protein, 20 aa, synthetic construct
RSSCFGGRIDRIGAQSGLGC

SEQ ID NO: 16 - protein, 20 aa, synthetic construct
RSSSFGGRIDRIGAQSGLGS

SEQ ID NO: 17 - protein, 20 aa, synthetic construct
  SITE 20: note = Amidated residue
RSSSFGGRIDRIGAQSGLGS

SEQ ID NO: 18 - protein, 15 aa, synthetic construct
  SITE 15: note = Amidated residue
  SITE 4..15: note = Intrachain disulfide bridge
RSSCFGGRIDRIGAC

SEQ ID NO: 19 - protein, 20 aa, synthetic construct
  SITE 4..20: note = Methylene thioacetal (Cys-S-CH2-S-Cys) linkage
RSSCFGGRIDRIGAQSGLGC

SEQ ID NO: 20 - protein, 20 aa, synthetic construct
  SITE 20: note = Amidated residue
  SITE 4..20: note = Methylene thioacetal (Cys-S-CH2-S-Cys) linkage
RSSCFGGRIDRIGAQSGLGC

SEQ ID NO: 21 - protein, 11 aa, synthetic construct
  SITE 1: note = D-Phenylalanine
  SITE 3: note = D-Proline
  SITE 4: note = Beta-cyclohexyl-L-alanine
  SITE 5: note = D-Alanine
  SITE 11: note = Amidated residue
FSPXAGPIDRI

SEQ ID NO: 22 - protein, 11 aa, synthetic construct
  SITE 1: note = D-Phenylalanine
  SITE 3: note = D-Hydroxyproline
  SITE 4: note = Beta-cyclohexyl-L-alanine
  SITE 5: note = D-Serine
  SITE 7: note = L-Hydroxyproline
  SITE 10: note = N omega-methyl-L-arginine
  SITE 11: note = Methylamine modified residue
FSXXSGXIDRI

SEQ ID NO: 23 - protein, 22 aa, synthetic construct
  SITE 1: note = D-Phenylalanine
  SITE 3: note = D-Proline
  SITE 4: note = Beta-cyclohexyl-L-alanine
  SITE 5: note = D-Alanine
  SITE 22: note = Amidated residue
FSPXAGPIDRIGSPSSGAPPPS

SEQ ID NO: 24 - protein, 11 aa, synthetic construct
  SITE 1: note = D-Phenylalanine
  SITE 3: note = D-Proline
  SITE 4: note = Beta-cyclohexyl-L-alanine
  SITE 5: note = D-Alanine
FSPXAGPIDRI

SEQ ID NO: 25 - protein, 12 aa, synthetic construct
  SITE 1: note = L-Ornithine
  SITE 2: note = D-Phenylalanine
  SITE 4: note = D-Proline
  SITE 5: note = Beta-cyclohexyl-L-alanine
  SITE 6: note = D-Alanine
  SITE 12: note = Amidated residue
XFSPXAGPIDSI

SEQ ID NO: 26 - protein, 12 aa, synthetic construct
  SITE 1: note = D-Phenylalanine
  SITE 3: note = D-Proline
  SITE 4: note = Beta-cyclohexyl-L-alanine
  SITE 5: note = D-Alanine
  SITE 12: note = Amidated L-2,3-Diaminopropionic Acid
FSPXAGPIDSIX

SEQ ID NO: 27 - protein, 11 aa, synthetic construct
  SITE 1: note = D-Phenylalanine
  SITE 3: note = D-Pipecolic Acid (D-Homoproline)
  SITE 4: note = Beta-cyclohexyl-L-alanine
  SITE 5: note = D-Alanine
  SITE 11: note = Amidated residue
FSXXAGPIDSI

SEQ ID NO: 28 - protein, 11 aa, synthetic construct
  SITE 4: note = Beta-cyclohexyl-L-alanine
  SITE 11: note = Amidated residue
FSGXGGRIDRI

SEQ ID NO: 29 - protein, 11 aa, synthetic construct
  SITE 4: note = Beta-cyclohexyl-L-alanine
  SITE 5: note = 2-Aminoisobutyric Acid
  SITE 11: note = Amidated residue
FSGXXGRIDRI

SEQ ID NO: 30 - protein, 11 aa, synthetic construct
  SITE 1: note = D-Phenylalanine
  SITE 3: note = D-Proline
  SITE 4: note = Beta-cyclohexyl-L-alanine
  SITE 5: note = D-Alanine
  SITE 11: note = Amidated residue
FSPXAGPIERI

SEQ ID NO: 31 - protein, 11 aa, synthetic construct
  SITE 1: note = D-Phenylalanine
  SITE 3: note = D-Proline
  SITE 4: note = Beta-cyclohexyl-L-alanine
  SITE 5: note = D-Alanine
  SITE 10: note = N-Methyl-L-arginine
  SITE 11: note = Amidated residue
FSPXAGPIDRI

SEQ ID NO: 32 - protein, 13 aa, synthetic construct
  SITE 13: note = Amidated residue
RSFSGFGGRIDRI

SEQ ID NO: 33 - protein, 21 aa, synthetic construct
  SITE 21: note = Amidated residue
RSFSGFGGRIDRIGAQSGLGS

SEQ ID NO: 34 - protein, 14 aa, synthetic construct
  SITE 14: note = Amidated residue
RSFSGFGGRIDRIG

SEQ ID NO: 35 - protein, 10 aa, synthetic construct
  SITE 2: note = Beta-cyclohexyl-L-alanine
  SITE 10: note = Amidated residue
CXGGRIDRIG

SEQ ID NO: 36 - protein, 10 aa, synthetic construct
  SITE 2: note = Beta-cyclohexyl-L-alanine
  SITE 10: note = Amidated residue
CXGGRIDRIG

SEQ ID NO: 37 - protein, 10 aa, synthetic construct
  SITE 2: note = Beta-cyclohexyl-L-alanine
  SITE 10: note = Amidated residue
SXGGRIDRIG

SEQ ID NO: 38 - protein, 10 aa, synthetic construct
  SITE 2: note = Beta-cyclohexyl-L-alanine
  SITE 10: note = Amidated residue
AXGGRIDRIG

SEQ ID NO: 39 - protein, 9 aa, synthetic construct
  SITE 1: note = Beta-cyclohexyl-L-alanine
  SITE 9: note = Amidated residue
XGGRIDRIG

SEQ ID NO: 40 - protein, 9 aa, synthetic construct
  SITE 1: note = Beta-cyclohexyl-L-alanine
  SITE 9: note = Amidated residue
XGGRIDRIG

SEQ ID NO: 41 - protein, 10 aa, synthetic construct
  SITE 2: note = Beta-cyclohexyl-L-alanine
  SITE 10: note = Amidated residue
GXGGRIDRIG

SEQ ID NO: 42 - protein, 11 aa, synthetic construct
  SITE 3: note = Beta-cyclohexyl-L-alanine
  SITE 11: note = Amidated residue
SGXGGRIDRIG

SEQ ID NO: 43 - protein, 12 aa, synthetic construct
  SITE 4: note = Beta-cyclohexyl-L-alanine
  SITE 12: note = Amidated residue
FSGXGGRIDRIG

SEQ ID NO: 44 - protein, 13 aa, synthetic construct
  SITE 5: note = Beta-cyclohexyl-L-alanine
  SITE 13: note = Amidated residue
SFSGXGGRIDRIG

SEQ ID NO: 45 - protein, 14 aa, synthetic construct
  SITE 6: note = Beta-cyclohexyl-L-alanine
  SITE 14: note = Amidated residue
RSFSGXGGRIDRIG

SEQ ID NO: 46 - protein, 13 aa, synthetic construct
  SITE 5: note = Beta-cyclohexyl-L-alanine
  SITE 13: note = Amidated residue
RSSGXGGRIDRIG

SEQ ID NO: 47 - protein, 12 aa, synthetic construct
  SITE 1: note = D-Phenylalanine
  SITE 4: note = Beta-cyclohexyl-L-alanine
  SITE 12: note = Amidated residue
FSGXGGRIDRIG

SEQ ID NO: 48 - protein, 12 aa, synthetic construct
  SITE 1: note = D-Phenylalanine
  SITE 4: note = Beta-cyclohexyl-L-alanine
  SITE 12: note = Amidated residue
FSGXGGRIDRIG

SEQ ID NO: 49 - protein, 12 aa, synthetic construct
  SITE 1: note = D-Phenylalanine
  SITE 3: note = D-Proline
  SITE 4: note = Beta-cyclohexyl-L-alanine
  SITE 12: note = Amidated residue
FSPXGGRIDRIG

SEQ ID NO: 50 - protein, 12 aa, synthetic construct
  SITE 1: note = D-Phenylalanine
  SITE 4: note = Beta-cyclohexyl-L-alanine
  SITE 5: note = D-Alanine
  SITE 12: note = Amidated residue
FSGXAGRIDRIG

SEQ ID NO: 51 - protein, 12 aa, synthetic construct
  SITE 1: note = D-Phenylalanine
  SITE 4: note = Beta-cyclohexyl-L-alanine
  SITE 12: note = Amidated residue
FSGXGGPIDRIG

SEQ ID NO: 52 - protein, 12 aa, synthetic construct
  SITE 1: note = D-Phenylalanine
  SITE 3: note = D-Proline
  SITE 4: note = Beta-cyclohexyl-L-alanine
  SITE 5: note = D-Alanine
  SITE 12: note = Amidated residue
FSPXAGPIDRIG

SEQ ID NO: 53 - protein, 11 aa, synthetic construct
  SITE 1: note = D-Phenylalanine
  SITE 3: note = D-Proline
  SITE 4: note = Beta-cyclohexyl-L-alanine
  SITE 5: note = D-Alanine
  SITE 11: note = Amidated residue
FSPXAGPIDRI

SEQ ID NO: 54 - protein, 11 aa, synthetic construct
  SITE 1: note = D-Phenylalanine
  SITE 3: note = D-Proline
  SITE 4: note = Beta-cyclohexyl-L-alanine
  SITE 5: note = D-Alanine
  SITE 11: note = Methylamine modified residue
FSPXAGPIDRI

SEQ ID NO: 55 - protein, 11 aa, synthetic construct
  SITE 1: note = D-Phenylalanine
  SITE 3: note = D-Proline
  SITE 4: note = Beta-cyclohexyl-L-alanine
  SITE 5: note = D-Alanine
  SITE 10: note = N omega-methyl-L-arginine
  SITE 11: note = Methylamine modified residue
FSPXAGPIDRI

SEQ ID NO: 56 - protein, 11 aa, synthetic construct
  SITE 1: note = D-Phenylalanine
  SITE 3: note = D-Hydroxyproline
  SITE 4: note = Beta-cyclohexyl-L-alanine
  SITE 5: note = D-Alanine
  SITE 7: note = L-Hydroxyproline
  SITE 10: note = N omega-methyl-L-arginine
  SITE 11: note = Methylamine modified residue
FSXXAGXIDRI

SEQ ID NO: 57 - protein, 11 aa, synthetic construct
  SITE 1: note = Eicosanedioic acid modified D-Phenylalanine
  SITE 3: note = D-Hydroxyproline
  SITE 4: note = Beta-cyclohexyl-L-alanine
  SITE 5: note = D-Serine
  SITE 7: note = L-Hydroxyproline
  SITE 10: note = N omega-methyl-L-arginine
  SITE 11: note = Methylamine modified residue
FSXXSGXIDRI

SEQ ID NO: 58 - protein, 21 aa, synthetic construct
  SITE 1: note = (2-[2-(2-amino-ethoxy)-ethoxy]-acetyl)3 modified D-Phenylalanine
  SITE 3: note = D-Proline
  SITE 4: note = Beta-cyclohexyl-L-alanine
  SITE 5: note = D-Alanine
FSPXAGPIDRIGGGGSGGGGS

SEQ ID NO: 59 - protein, 31 aa, synthetic construct
  SITE 11: note = D-Phenylalanine
  SITE 13: note = D-Proline
  SITE 14: note = Beta-cyclohexyl-L-alanine
  SITE 15: note = D-Alanine
GGGGSGGGGSFSPXAGPIDRIGGGGSGGGGS

SEQ ID NO: 60 - protein, 20 aa, synthetic construct
GGGGSGGGGSGGGGSGGGGS

SEQ ID NO: 61 - protein, 20 aa, synthetic construct
  SITE 1: note = (2-[2-(2-amino-ethoxy)-ethoxy]-acetyl)3 modified residue
GGGGSGGGGSGGGGSGGGGS

SEQ ID NO: 62 - protein, 20 aa, synthetic construct
GGGGHGGGGHGGGGHGGGGH

SEQ ID NO: 63 - protein, 20 aa, synthetic construct
  SITE 5: note = 4-Pyridyl-L-Alanine
  SITE 10: note = 4-Pyridyl-L-Alanine
  SITE 15: note = 4-Pyridyl-L-Alanine
  SITE 20: note = 4-Pyridyl-L-Alanine
GGGGXGGGGXGGGGXGGGGX

SEQ ID NO: 64 - protein, 21 aa, synthetic construct
GGGGSHHHGGGGSHHHGGGGS

SEQ ID NO: 65 - protein, 10 aa, synthetic construct
  SITE 1: note = (2-[2-(2-amino-ethoxy)-ethoxy]-acetyl)3 modified residue
GGGGSGGGGS

SEQ ID NO: 66 - protein, 30 aa, synthetic construct
GGGGSGGGGSGGGGSGGGGSGGGGSGGGGS

SEQ ID NO: 67 - protein, 21 aa, synthetic construct
GGGGSGGGGSGGGGSGGGGSP

SEQ ID NO: 68 - protein, 21 aa, synthetic construct
  SITE 5: note = 4-Pyridyl-L-Alanine
  SITE 10: note = 4-Pyridyl-L-Alanine
  SITE 15: note = 4-Pyridyl-L-Alanine
  SITE 20: note = 4-Pyridyl-L-Alanine
GGGGXGGGGXGGGGXGGGGXP

SEQ ID NO: 69 - protein, 30 aa, synthetic construct
  SITE 5: note = 4-Pyridyl-L-Alanine
  SITE 10: note = 4-Pyridyl-L-Alanine
  SITE 15: note = 4-Pyridyl-L-Alanine
  SITE 20: note = 4-Pyridyl-L-Alanine
  SITE 25: note = 4-Pyridyl-L-Alanine
  SITE 30: note = 4-Pyridyl-L-Alanine
GGGGXGGGGXGGGGXGGGGXGGGGXGGGGX

SEQ ID NO: 70 - protein, 30 aa, synthetic construct
GGGGEGGGGEGGGGSGGGGSGGGGSGGGGS

SEQ ID NO: 71 - protein, 30 aa, synthetic construct
GGGGEGGGGSGGGGEGGGGSGGGGEGGGGS

SEQ ID NO: 72 - protein, 30 aa, synthetic construct
GGGGEGGGGEGGGGEKEKEKGGGGSGGGGS

SEQ ID NO: 73 - protein, 11 aa, synthetic construct
GSPSSGAPPPS

SEQ ID NO: 74 - protein, 540 aa, Homo sapiens
MPSLLVLTFSPCVLLGWALLAGGTGGGGVGGGGGGAGIGGGRQEREALPPQKIEVLVLLPQDDSYLFSLTRVRPAIEYALRSVEGNGTGRRLLPPGTRFQVAYEDSDCGNRALFSLVDRVAAARGAKPDLILGPVCEYAAAPVARLASHWDLPMLSAGALAAGFQHKDSEYSHLTRVAPAYAKMGEMMLALFRHHHWSRAALVYSDDKLERNCYFTLEGVHEVFQEEGLHTSIYSFDETKDLDLEDIVRNIQASERVVIMCASSDTIRSIMLVAHRHGMTSGDYAFFNIELFNSSSYGDGSWKRGDKHDFEAKQAYSSLQTVTLLRTVKPEFEKFSMEVKSSVEKQGLNMEDYVNMFVEGFHDAILLYVLALHEVLRAGYSKKDGGKIIQQTWNRTFEGIAGQVSIDANGDRYGDFSVIAMTDVEAGTQEVIGDYFGKEGRFEMRPNVKYPWGPLKLRIDENRIVEHTNSSPCKSSGGLEESAVTGIVVGALLGAGLLMAFYFFRKKYRITIERRTQQEESNLGKHELREDSIRSHFSVA

SEQ ID NO: 75 - protein, 540 aa, Homo sapiens
MPSLLVLTFSPCVLLGWALLAGGTGGGGVGGGGGGAGIGGGRQEREALPPQKIEVLVLLPQDDSYLFSLTRVRPAIEYALRSVEGNGTGRRLLPPGTRFQVAYEDSDCGNRALFSLVDRVAAARGAKPDLILGPVCEYAAAPVARLASHWDLPMLSAGALAAGFQHKDSEYSHLTRVAPAYAKMGEMMLALFRHHHWSRAALVYSDDKLERNCYFTLEGVHEVFQEEGLHTSIYSFDETKDLDLEDIVRNIQASERVVIMCASSDTIRSIMLVAHRHGMTSGDYAFFNIELFNSSSYGDGSWKRGDKHDFEAKQAYSSLQTVTLLRTVKPEFEKFSMEVKSSVEKQGLNMEDYVNMFVEGFHDAILLYVLALHEVLRAGYSKKDGGKIIQQTWNRTFEGIAGQVSIDANGDRYGDFSVIAMTDVEAGTQEVIGDYFGKEGRFEMRPNVKYPWGPLKLRIDENRIVEHTNSSPCKSCGLEESAVTGIVVGALLGAGLLMAFYFFRKKYRITIERRTQQEESNLGKHRELREDSIRSHFSVA

SEQ ID NO: 76 - DNA, 5995 bp, Homo sapiens
  source 1..5995: mol_type = genomic DNA
agtcccgagaggtgcccgagggaaaaggaggcggcagctaaactggtcctggagagaagccccttccgcccctctcctcagccagcatgtcccggactccgccgctcctcagtccgcgcggtggggaccccgggccgtggcggccggcgcagccctgacgggttgcgaaccagggggcgccccgaacgcgggggttggggtctgggagcgcgagcggccgctacggtacgagcggggtgtgctgagtcccgtggccacccccggccccagccatgaggagggacgagcgagacgccaaagccatgcggtccctgcagccgccggatggggccggctcgccccccgagagtctgaggaacggctacgtgaagagctgcgtgagccccttgcggcaggaccctccgcgcggcttcttcttccacctctgccgcttctgcaacgtggagctgcggccgccgccggcctctccccagcagccgcggcgctgctcccccttctgccgggcgcgcctctcgctgggcgccctggctgcctttgtcctcgccctgctgctgggcgcggaacccgagagctgggctgccggggccgcctggctgcggacgctgctgagcgtgtgttcgcacagcttgagccccctcttcagcatcgcctgtgccttcttcttcctcacctgcttcctcacccggaccaagcggggacccggcccgggccggagctgcggctcctggtggctgctggcgctgcccgcctgctgttacctgggggacttcttggtgtggcagtggtggtcttggccttggggggatggcgacgcagggtccgcggccccgcacacgcccccggaggcggcagcgggcaggttgctgctggtgctgagctgcgtagggctgctgctgacgctcgcgcacccgctgcggctccggcactgcgttctggtgctgctcctggccagcttcgtctggtgggtctccttcaccagcctcgggtcgctgccctccgccctcaggccgctgctctccggcctggtggggggcgctggctgcctgctggccctggggttggatcacttctttcaaatcagggaagcgcctcttcatcctcgactgtccagtgccgccgaagaaaaagtgcctgtgatccgaccccggaggaggtccagctgcgtgtcgttaggagaaactgcagccagttactatggcagttgcaaaatattcaggagaccgtcgttgccttgtatttccagagaacagatgattctttgggattgggacttaaaacaatggtataagcctcattatcaaaattctggaggtggaaatggagttgatctttcagtgctaaatgaggctcgcaatatggtgtcagatcttctgactgatccaagccttccaccacaagtcatttcctctctacggagtattagtagcttaatgggtgctttctcaggttcctgtaggccaaagattaatcctctcacaccatttcctggattttacccctgttctgaaatagaggacccagctgagaaaggggatagaaaacttaacaagggactaaataggaatagtttgccaactccacagctgaggagaagctcaggaacttcaggattgctacctgttgaacagtcttcaaggtgggatcgtaataatggcaaaagacctcaccaagaatttggcatttcaagtcaaggatgctatctaaatgggccttttaattcaaatctactgactatcccgaagcaaaggtcatcttctgtatcactgactcaccatgtaggtctcagaagagctggtgttttgtccagtctgagtcctgtgaattcttccaaccatggaccagtgtctactggctctctaactaatcgatcacccatagaatttcctgatactgctgattttcttaataagccaagcgttatcttgcagagatctctgggcaatgcacctaatactccagatttttatcagcaacttagaaattctgatagcaatctgtgtaacagctgtggacatcaaatgctgaaatatgtttcaacatctgaatcagatggtacagattgctgcagtggaaaatcaggtgaagaagaaaacattttctcgaaagaatcattcaaacttatggaaactcaacaagaagaggaaacagagaagaaagacagcagaaaattatttcaggaaggtgataagtggctaacagaagaggcacagagtgaacagcaaacaaatattgaacaggaagtatcactggacctgattttagtagaagagtatgactcattaatagaaaagatgagcaactggaattttccaatttttgaacttgtagaaaagatgggagagaaatcaggaaggattctcagtcaggttatgtataccttatttcaagacactggtttattggaaatatttaaaattcccactcaacaatttatgaactattttcgtgcattagaaaatggctatcgagacattccttatcacaatcgtatacatgccacagatgtgctacatgcagtttggtatctgacaacacggccagttcctggcttacagcagatccacaatggttgtggaacaggaaatgaaacagattctgatggtagaattaaccatgggcgaattgcttatatttcttcgaagagctgctctaatcctgatgagagttatggctgcctgtcttcaaacattcctgcattagaattgatggctctatacgtggcagctgccatgcatgattatgatcacccagggaggacaaatgcatttctagtggctacaaatgcccctcaggcagttttatacaatgacagatctgttctggaaaatcatcatgctgcgtcagcttggaatctatatctttctcgcccagaatacaacttccttcttcatcttgatcatgtggaattcaagcgctttcgttttttagtcattgaagcaatccttgctacggatcttaaaaagcattttgattttctcgcagaattcaatgccaaggcaaatgatgtaaatagtaatggcatagaatggagtaatgaaaatgatcgcctcttggtatgccaggtgtgcatcaaactggcagatataaatggcccagcaaaagttcgagacttgcatttgaaatggacagaaggcattgtcaatgaattttatgagcagggagatgaagaagcaaatcttggtctgcccatcagtccattcatggatcgttcttctcctcaactagcaaaactccaagaatcttttatcacccacatagtgggtcccctgtgtaactcctatgatgctgctggtttgctaccaggtcagtggttagaagcagaagaggataatgatactgaaagtggtgatgatgaagacggtgaagaattagatacagaagatgaagaaatggaaaacaatctaaatccaaaaccaccaagaaggaaaagcagacggcgaatattttgtcagctaatgcaccacctcactgaaaaccacaagatatggaaggaaatcgtagaggaagaagaaaaatgtaaagctgatgggaataaactgcaggtggagaattcctccttacctcaagcagatgagattcaggtaattgaagaggcagatgaagaggaatagcgacagtttgagtaaaagaaaagtcatattgaagaagcccagagggttgtgcccaggggcagaaatcattgcctagtgttcaccggctgactctcaactgaccattcccatgtggacaggccttaatactgtgagaggatccttgctctgctggcagtttcccactcctatgcactttcacaggaactagaaaactattcttaaaccaaaaataccatccgtgttgacccatgttgcagagcccttacttaaatccttcactggtgtatgaatactttgtcataatgctgctttgctgggtagtgagctcttatttttcactgggggtcagctataactaaaaactcaagtgacatatttcagttaccaaagtggccaggaactttttgcttttatgaaaatagattcatattgtatttcccagtgtgtcttttatgtctttgaatgttttggagaaaagtctatgcctgtctaaaaatgaatccagtgttgcctttctgagggatttctgctcaatgcaatacactgttcagtgctattctcccagctaggtttatccatgaaggactgagtgacctttgttgtatttaacaaaatccaggtgcatcaatttctgatgctttttactattgtgtattatctactatgtgtgttttatttctgctgagagtattcaggtttgccatggacatcagaagtttgaattccagtcttatcttatgttccatggctgaattttaaagctgtttaggtttaacaatgaagggatttattctttagtcaaaattgttgtttttactctagctcaggattcgtatttttaaagatttagttaatatgaacacagcacagatttgttagaagaaaaaaaatttgctgtaataccaaaactaacctcatcaaagatacagaaaaaaagaaatatagtgagccctaaaggacacatacattgaataaataattggaacatgtggttatctttagatccacatcttagctgtcatttgttcactctaaaactgatgttcatctttctgttaatttccctctgcctaaagactacatgacagaaatgacctatcactacttattatttctgaagcctaactgcaagactgatttctgagaacaagtaaagaactggaatacttatttttcatataaaaatctaaatgtgttaataaatcatttcatacaaaagtacattattaaataaccacattattaaaataattgcaagaaaatggaccatatttacaatgttttgtaaacttgctagtgtgtggatatgtaccctacttgtgaaatacatttgaagatataaagagcagccaaaatgatggcaaaatggtaggctaatattttctattattattggagaacatatcatattttggaatcatgcaattttgcacacagtgaaaccattaattttccaaggtaattcctttagaatatggtattggcatgcagtttcttacttatctagaatatttggcttatctgaaagatatcaatttaagatctctggaagtgttagaatttttgatccttcacagtgtcaatatttaatgaatcactaagctttatttattagacgtgttgagtgagtgctgagttccttgctgccacttttgttaccattgtcacacactatgtgtaaaccagtcccaccacttattactaataaaattttgactgataatttatatttgcacttacaatatatatatcctgtccttatatttctctagagtacattttccatcatgtttaagtgtatttctgctattatttcctctcctgcagaatacatacaagtgtatgtgtataaagtcatacatgtacaagcatgcatattgagattgaatcacatttccatactgtctgttattttattgggttttatattgggtttctttagtttatgttgttttctcaaaagcagcattttaaattacgaatactggacttattggatttaattataaatccaattactactggaaactcatttttacataatatagtccttaaattatttaacccttgctaagtaattgacatatgtaacaataactagcctaaagaaacccaaaaaagtatctctcccgagctgaaacttaaaaattcgtaagtgtaagaaagaatgtgagaatatattaaatgcacactgtaccattagatgaaatcttacttgagaaattgccataagccatattacagatcttactttgttactgaatcagattaatttcttgttataataattttcatcataaattttctatttttaaagccgctggtactagaaatattcttttaatgctatatctatgtacctactgacacatttttctccataaaagtacttttaaaaatta

SEQ ID NO: 77 - protein, 1112 aa, Homo sapiens
MRRDERDAKAMRSLQPPDGAGSPPESLRNGYVKSCVSPLRQDPPRGFFFHLCRFCNVELRPPPASPQQPRRCSPFCRARLSLGALAAFVLALLLGAEPESWAAGAAWLRTLLSVCSHSLSPLFSIACAFFFLTCFLTRTKRGPGPGRSCGSWWLLALPACCYLGDFLVWQWWSWPWGDGDAGSAAPHTPPEAAAGRLLLVLSCVGLLLTLAHPLRLRHCVLVLLLASFVWWVSFTSLGSLPSALRPLLSGLVGGAGCLLALGLDHFFQIREAPLHPRLSSAAEEKVPVIRPRRRSSCVSLGETAASYYGSCKIFRRPSLPCISREQMILWDWDLKQWYKPHYQNSGGGNGVDLSVLNEARNMVSDLLTDPSLPPQVISSLRSISSLMGAFSGSCRPKINPLTPFPGFYPCSEIEDPAEKGDRKLNKGLNRNSLPTPQLRRSSGTSGLLPVEQSSRWDRNNGKRPHQEFGISSQGCYLNGPFNSNLLTIPKQRSSSVSLTHHVGLRRAGVLSSLSPVNSSNHGPVSTGSLTNRSPIEFPDTADFLNKPSVILQRSLGNAPNTPDFYQQLRNSDSNLCNSCGHQMLKYVSTSESDGTDCCSGKSGEEENIFSKESFKLMETQQEEETEKKDSRKLFQEGDKWLTEEAQSEQQTNIEQEVSLDLILVEEYDSLIEKMSNWNFPIFELVEKMGEKSGRILSQVMYTLFQDTGLLEIFKIPTQQFMNYFRALENGYRDIPYHNRIHATDVLHAVWYLTTRPVPGLQQIHNGCGTGNETDSDGRINHGRIAYISSKSCSNPDESYGCLSSNIPALELMALYVAAAMHDYDHPGRTNAFLVATNAPQAVLYNDRSVLENHHAASAWNLYLSRPEYNFLLHLDHVEFKRFRFLVIEAILATDLKKHFDFLAEFNAKANDVNSNGIEWSNENDRLLVCQVCIKLADINGPAKVRDLHLKWTEGIVNEFYEQGDEEANLGLPISPFMDRSSPQLAKLQESFITHIVGPLCNSYDAAGLLPGQWLEAEEDNDTESGDDEDGEELDTEDEEMENNLNPKPPRRKSRRRIFCQLMHHLTENHKIWKEIVEEEEKCKADGNKLQVENSSLPQADEIQVIEEADEEE

SEQ ID NO: 78 - DNA, 5314 bp, Mus sp.
  source 1..5314: mol_type = genomic DNA
aactgttgcagcgcgcgggagctgggaggcgacgccgccgtctcccgtcccgagccgcgcttgagggaaaagggaagaggcgtccgcggcggtcccgggacaccaagaagcccttctcgccgctctcagtggccggcatgaggcggacgccgccgcccctcagcccgcgcgccggggatcccggccggtggcggcggcgggcgcagccgtgaccgctctgcgaagctcggggcgcccagaacgcggagggcggcgcggggtcggcaagcgccagcggccccccggcggcccggggccatgaggaaagacgagcgcgagcgggacgcgccagccatgaggtccccgccgccgccgccagcctcggccgcctcgccccccgagagcctgcgcaacggctacgtgaagagctgcgtgagcccgctgcggcaggaccctccgcgcagcttcttcttccacctctgccgcttctgcaacgtggagccgccggcggcctcgctccgcgccggggcacgcctctcgctcggcgtcctggccgcctttgtcctggccgcgctgctgggcgcgaggcccgagcgctgggcggccgcggcagccgggctccggacgctgctgagcgcctgctcgctcagcctcagcccgctcttcagcatcgcctgtgccttcttcttcctcacctgtttcctgacgcgcgcgcagcgcggcccgggccgcggcgccggctcctggtggctgctggcgctgcccgcctgctgctacctgggcgacttcgcggcgtggcagtggtggtcgtggctgcgtggggagccggcggcggcgggccggctctgcctggtgctgagctgcgtggggctgctgacgctcgcgccccgcgtgaggctgcggcacggcgtcctggtgctgctcttcgccggcctggtgtggtgggtgtccttctccggcctcggggctctgccgcccgcgctcaggcctctgctgtcgtgcctggtcgggggcgcgggatgcctgctagccctgggcttggaccacttctttcacgtccggggagcctcccctccgccgcgctcggcgagtaccgcggaggaaaaagtgcctgtgatcagaccccggaggaggtccagctgcgtgtcgctgggagaaagcgcagccggttactatggcagtggcaagatgttcaggagaccgtcgttgccttgtatttcccgagaacagatgatcctctgggactgggacttgaagcagtggtgtaaacctcattaccagaattctggaggtggaaatggagttgatctttcagtgctaaatgaagctcgcaatatggtgtcagacctgctgattgacccaagccttcccccacaagtcatttcttctctgcggagtatcagtagcttgatgggtgctttctcaggttcctgtaggccaaagattaattcttttacaccatttcctggattttatccctgctctgaagtagaagatccagttgagaaaggagatcgaaaacttcacaagggattgagtggcagaaccagtttcccaactccacagctgaggaggagctctggagcctcatcgttgctgactaatgagcactgttcaaggtgggatcgcagcagtggtaagaggtcttaccaagaactcagtgtttcaagtcatggatgccacctaaatgggccttttagttcaaatctttttacaattccaaagcagaggtcatcgtctgtgtcactgacgcaccatgcaggtctgagaagagctggtgctttgcccagccacagtcttctgaattcttcaagccatgtaccagtgtctgctggctctctaactaatcgatcacccataggatttcctgataccactgattttcttactaagccaaatattattttacatagatcactgggcagtgtatcaagtgcagcagatttccatcagtaccttaggaactctgacagcaatctgtgtagcagctgtggacaccaaatactcaaatatgtttcaacatgtgaacccgatggtacagaccaccccagtgaaaaatcaggtgaagaagacagcagtgttttctcaaaagaaccattgaacattgtggaaacccaagaagaagagaccatgaagaaagcctgcagggagttatttttggaaggtgatagtcacctgatggaagaggcacagcaaccaaatatcgatcaggaagtgtcactggatccaatgttagtagaagattatgattcattaatagaaaagatgaacaactggaattttcagatttttgagcttgtagaaaagatgggagaaaaatcaggaaggattctcagtcaggttatgtatactttatttcaagatactggtttattggaaacatttaaaattcccactcaagaatttatgaattattttcgtgccttagaaaatggctaccgggacattccatatcacaatcgtgtgcatgccacagatgtcctacatgctgtttggtatttgacaacccgaccaattcctggcttacctcagatccataataaccatgaaacggaaaccaaagcagattcagatggtagacttggttctggacagattgcttacatttcttcgaagagttgctgtattccagatatgagttatggctgcctatcttcaaacatccctgcattagaattgatggctttgtatgtggcagctgccatgcacgattacgatcacccaggaagaacaaatgcgtttctagtggctacaaatgcacctcaggcagttttatacaatgacagatctgttctagagaatcatcatgctgcatcagcttggaatctgtatctttctcgcccagagtacaacttcctccttaaccttgatcacatggaattcaagcggtttcgatttttagttatagaagcaatccttgctacagatctcaaaaaacattttgatttccttgcagaattcaatgccaaggccaatgatgtaaatagtaacggtatagaatggagcagtgaaaacgatcgcctcttggtctgccaggtgtgcatcaaattagcagatatcaatggcccagcaaaagatcgggacctacatttgagatggacagaaggcattgtgaatgaattttatgagcagggagatgaagaagcaaccctgggtctacctattagtcccttcatggatcgttcttctcctcaactagcaaaactccaagaatcttttatcacccacattgtgggccccctgtgcaactcctatgatgctgctggcttgctgccgggtcagtggatagaaacagaagagggtgatgatacagaaagtgatgatgatgatgatgatgatgatggtggtggtgaagaattagattcagatgatgaagaaacagaagacaatctaaatcctaaaccacaaagaaggaaaggcaggcggcgaatattttgccaactaatgcaccacctcactgaaaaccacaagatatggaaggaaatcatagaagaagaagaagaaaaatgtaaagctgaggggaacaaactgcaggtggataatgcctccttacctcaggcagatgagattcaggttattgaagaagcagatgaagaggaagaacaaatgtttgaatgagaagagaactcatgctgaaggagcctggggtgctgttcccagggtcattacctaatgctcactgtactgattctcaactgaccattcccatgtgggcacgccttaatactgtgagaggatcctggctaccctggcagttctcactcctaagcactttcattacaaacaagaaactgattcttagagcttgctgcagttgactcatgctgcaaagccttcctcaaagccttcactggtgtgtaaatagtgtgtcataatgctgctttgctgggtagtgagctcttatttctcatgatgagggagggaaggctaaaactgaaaagtcaagtgacttcggtttttgaagtaaccatatttcttttatgaaaacaggattcatcttgtatttccaaatatatcttttatgtctttgtttgggggtggggtggtgcaagaaacagacctctatgcttaatacaaaaatgaattcatggtggcctttctgagtgatttctgctcgtggcagcacactgttcagtgtggttctcctggcttcatcgaggaaggactgaggacctttgttatacttagcaaaacccagatgcatcaatttctgatgctttttattgttgtgtataatctatttacttgttttatttctgcctaaagtattcaggtttgctgtggacatcagaggtctgaattctgttcttactgattttgttccatggttgaatttaaaagtatataataatgaaggagctttattctttattcaaatctgttcttattcttattctttctcaggataagtaattttaaacaattattataaatattgcatagatttgccagagaaaaaaacattgtcctgatattgatgttatcttttatgaaatgagcaccattttattttaattagagtcaagaaaaaggagctggccatcttttgccttaatggaaaatcaatgaaaccaatcccatcgaagatattgcctaaatatttagttatctttagatatatgtcttaggtgtctagtaaaattgacattttttattgttaatatctttctgcttcaagagtacatggcagagatgacacatcactatttagtaatattacagccccacagacagaattttgaagtaaagtacataatgggaatgcatattaatttttaataaagtgctataaaataaatatgctatgaatagttcaataaataattccataaatgcttataaataaataatttactaagaaaacaggacacatttatgtttatataatctcattagagtgtggctatgtgccccagttgtgaaaaattattgaagttatacaaagcaaccaaaataataccaaaatggtaaactggtttcttcttatcctttatacattattttgaagccattgaactttgtgcacagttaactgtcagtttccacagtatttcctatatagtgtgatgctggaatttcttacctacctaagatatttgggttgtctacaaggccacagttaaagattgattggagtactggtatttttgatcctgtaggtaccatatttaatgaatcactacactttatttattaaacatgttgagtgctgagttccttcctgtcacttttgctaccacaactacatcatttgtaaactggtcccaccatatattactaagtaataaaattttaactgataatctaaaaaaaaaaaaaaaaaaaaaaaaaaaaa

SEQ ID NO: 79 - protein, 1099 aa, Mus sp.
MRKDERERDAPAMRSPPPPPASAASPPESLRNGYVKSCVSPLRQDPPRSFFFHLCRFCNVEPPAASLRAGARLSLGVLAAFVLAALLGARPERWAAAAAGLRTLLSACSLSLSPLFSIACAFFFLTCFLTRAQRGPGRGAGSWWLLALPACCYLGDFAAWQWWSWLRGEPAAAGRLCLVLSCVGLLTLAPRVRLRHGVLVLLFAGLVWWVSFSGLGALPPALRPLLSCLVGGAGCLLALGLDHFFHVRGASPPPRSASTAEEKVPVIRPRRRSSCVSLGESAAGYYGSGKMFRRPSLPCISREQMILWDWDLKQWCKPHYQNSGGGNGVDLSVLNEARNMVSDLLIDPSLPPQVISSLRSISSLMGAFSGSCRPKINSFTPFPGFYPCSEVEDPVEKGDRKLHKGLSGRTSFPTPQLRRSSGASSLLTNEHCSRWDRSSGKRSYQELSVSSHGCHLNGPFSSNLFTIPKQRSSSVSLTHHAGLRRAGALPSHSLLNSSSHVPVSAGSLTNRSPIGFPDTTDFLTKPNIILHRSLGSVSSAADFHQYLRNSDSNLCSSCGHQILKYVSTCEPDGTDHPSEKSGEEDSSVFSKEPLNIVETQEEETMKKACRELFLEGDSHLMEEAQQPNIDQEVSLDPMLVEDYDSLIEKMNNWNFQIFELVEKMGEKSGRILSQVMYTLFQDTGLLETFKIPTQEFMNYFRALENGYRDIPYHNRVHATDVLHAVWYLTTRPIPGLPQIHNNHETETKADSDGRLGSGQIAYISSKSCCIPDMSYGCLSSNIPALELMALYVAAAMHDYDHPGRTNAFLVATNAPQAVLYNDRSVLENHHAASAWNLYLSRPEYNFLLNLDHMEFKRFRFLVIEAILATDLKKHFDFLAEFNAKANDVNSNGIEWSSENDRLLVCQVCIKLADINGPAKDRDLHLRWTEGIVNEFYEQGDEEATLGLPISPFMDRSSPQLAKLQESFITHIVGPLCNSYDAAGLLPGQWIETEEGDDTESDDDDDDDDGGGEELDSDDEETEDNLNPKPQRRKGRRRIFCQLMHHLTENHKIWKEIIEEEEEKCKAEGNKLQVDNASLPQADEIQVIEEADEEEEQMFE

SEQ ID NO: 80 - RNA, 21 nt, synthetic construct
  source 1..21: mol_type = other RNA
aacttgtagaaaagatgggaa

SEQ ID NO: 81 - RNA, 21 nt, synthetic construct
  source 1..21: mol_type = other RNA
accacaagatatggaaggaaa

SEQ ID NO: 82 - RNA, 21 nt, synthetic construct
  source 1..21: mol_type = other RNA
actagcaaaactccaagaata

SEQ ID NO: 83 - RNA, 21 nt, synthetic construct
  source 1..21: mol_type = other RNA
actggctctctaactaatcga

SEQ ID NO: 84 - RNA, 21 nt, synthetic construct
  source 1..21: mol_type = other RNA
caaaactccaagaatctttta

SEQ ID NO: 85 - RNA, 21 nt, synthetic construct
  source 1..21: mol_type = other RNA
ccccggaggaggtccagctga

SEQ ID NO: 86 - RNA, 21 nt, synthetic construct
  source 1..21: mol_type = other RNA
cctgcattagaattgatggca

SEQ ID NO: 87 - RNA, 21 nt, synthetic construct
  source 1..21: mol_type = other RNA
ctaactaatcgatcacccata

SEQ ID NO: 88 - RNA, 21 nt, synthetic construct
  source 1..21: mol_type = other RNA
ctcaactagcaaaactccaaa

SEQ ID NO: 89 - RNA, 21 nt, synthetic construct
  source 1..21: mol_type = other RNA
ctctctaactaatcgatcaca

SEQ ID NO: 90 - RNA, 21 nt, synthetic construct
  source 1..21: mol_type = other RNA
ctgcattagaattgatggcta

SEQ ID NO: 91 - RNA, 21 nt, synthetic construct
  source 1..21: mol_type = other RNA
ctggctctctaactaatcgaa

SEQ ID NO: 92 - RNA, 21 nt, synthetic construct
  source 1..21: mol_type = other RNA
gaagaagaaaaatgtaaagca

SEQ ID NO: 93 - RNA, 21 nt, synthetic construct
  source 1..21: mol_type = other RNA
gttttatacaatgacagatca

SEQ ID NO: 94 - RNA, 21 nt, synthetic construct
  source 1..21: mol_type = other RNA
tagcaaaactccaagaatcta

SEQ ID NO: 95 - RNA, 21 nt, synthetic construct
  source 1..21: mol_type = other RNA
tctaactaatcgatcacccaa

SEQ ID NO: 96 - RNA, 21 nt, synthetic construct
  source 1..21: mol_type = other RNA
tggctctctaactaatcgata

SEQ ID NO: 97 - RNA, 21 nt, synthetic construct
  source 1..21: mol_type = other RNA
aagagtatgactcattaataa

SEQ ID NO: 98 - RNA, 21 nt, synthetic construct
  source 1..21: mol_type = other RNA
aattttccaatttttgaacta

SEQ ID NO: 99 - RNA, 21 nt, synthetic construct
  source 1..21: mol_type = other RNA
gaattttccaatttttgaaca

SEQ ID NO: 100 - RNA, 21 nt, synthetic construct
  source 1..21: mol_type = other RNA
gttatgtataccttatttcaa

SEQ ID NO: 101 - RNA, 21 nt, synthetic construct
  source 1..21: mol_type = other RNA
aatttttgaacttgtagaaaa

SEQ ID NO: 102 - RNA, 21 nt, synthetic construct
  source 1..21: mol_type = other RNA
tatgtataccttatttcaaga

SEQ ID NO: 103 - RNA, 21 nt, synthetic construct
  source 1..21: mol_type = other RNA
caagtcaaggatgctatctaa

SEQ ID NO: 104 - RNA, 21 nt, synthetic construct
  source 1..21: mol_type = other RNA
aagaatcattcaaacttatga

SEQ ID NO: 105 - RNA, 21 nt, synthetic construct
  source 1..21: mol_type = other RNA
attgcttatatttcttcgaaa

SEQ ID NO: 106 - RNA, 21 nt, synthetic construct
  source 1..21: mol_type = other RNA
gctatcgagacattccttata

SEQ ID NO: 107 - RNA, 21 nt, synthetic construct
  source 1..21: mol_type = other RNA
aactccaagaatcttttatca

SEQ ID NO: 108 - RNA, 21 nt, synthetic construct
  source 1..21: mol_type = other RNA
tggaattttccaatttttgaa

SEQ ID NO: 109 - RNA, 21 nt, synthetic construct
  source 1..21: mol_type = other RNA
gaaagaatcattcaaacttaa

SEQ ID NO: 110 - RNA, 21 nt, synthetic construct
  source 1..21: mol_type = other RNA
tttattggaaatatttaaaaa

SEQ ID NO: 111 - RNA, 21 nt, synthetic construct
  source 1..21: mol_type = other RNA
aaactccaagaatcttttata

SEQ ID NO: 112 - RNA, 21 nt, synthetic construct
  source 1..21: mol_type = other RNA
gaagaagaaaacattttctca

SEQ ID NO: 113 - RNA, 21 nt, synthetic construct
  source 1..21: mol_type = other RNA
acggtgaagaattagatacaa

SEQ ID NO: 114 - RNA, 21 nt, synthetic construct
  source 1..21: mol_type = other RNA
agggactaaataggaatagta

SEQ ID NO: 115 - RNA, 21 nt, synthetic construct
  source 1..21: mol_type = other RNA
agaaatggaaaacaatctaaa

SEQ ID NO: 116 - RNA, 21 nt, synthetic construct
  source 1..21: mol_type = other RNA
aaggtcatcttctgtatcaca

SEQ ID NO: 117 - RNA, 21 nt, synthetic construct
  source 1..21: mol_type = other RNA
cagtccattcatggatcgtta

SEQ ID NO: 118 - RNA, 21 nt, synthetic construct
  source 1..21: mol_type = other RNA
ttttccaatttttgaacttga

SEQ ID NO: 119 - RNA, 21 nt, synthetic construct
  source 1..21: mol_type = other RNA
ctcaacaatttatgaactata

SEQ ID NO: 120 - RNA, 21 nt, synthetic construct
  source 1..21: mol_type = other RNA
cgaattgcttatatttcttca

SEQ ID NO: 121 - RNA, 21 nt, synthetic construct
  source 1..21: mol_type = other RNA
gaattgcttatatttcttcga

SEQ ID NO: 122 - RNA, 21 nt, synthetic construct
  source 1..21: mol_type = other RNA
caatttttgaacttgtagaaa

SEQ ID NO: 123 - RNA, 21 nt, synthetic construct
  source 1..21: mol_type = other RNA
aggaagaagaaaaatgtaaaa

SEQ ID NO: 124 - RNA, 21 nt, synthetic construct
  source 1..21: mol_type = other RNA
tggtataagcctcattatcaa

SEQ ID NO: 125 - RNA, 23 nt, synthetic construct
  source 1..23: mol_type = other RNA
ttcccatcttttctacaagttca

SEQ ID NO: 126 - RNA, 23 nt, synthetic construct
  source 1..23: mol_type = other RNA
tttccttccatatcttgtggttt

SEQ ID NO: 127 - RNA, 23 nt, synthetic construct
  source 1..23: mol_type = other RNA
tattcttggagttttgctagttg

SEQ ID NO: 128 - RNA, 23 nt, synthetic construct
  source 1..23: mol_type = other RNA
tcgattagttagagagccagtag

SEQ ID NO: 129 - RNA, 23 nt, synthetic construct
  source 1..23: mol_type = other RNA
taaaagattcttggagttttgct

SEQ ID NO: 130 - RNA, 23 nt, synthetic construct
  source 1..23: mol_type = other RNA
tcagctggacctcctccggggtc

SEQ ID NO: 131 - RNA, 23 nt, synthetic construct
  source 1..23: mol_type = other RNA
tgccatcaattctaatgcaggaa

SEQ ID NO: 132 - RNA, 23 nt, synthetic construct
  source 1..23: mol_type = other RNA
tatgggtgatcgattagttagag

SEQ ID NO: 133 - RNA, 23 nt, synthetic construct
  source 1..23: mol_type = other RNA
tttggagttttgctagttgagga

SEQ ID NO: 134 - RNA, 23 nt, synthetic construct
  source 1..23: mol_type = other RNA
tgtgatcgattagttagagagcc

SEQ ID NO: 135 - RNA, 23 nt, synthetic construct
  source 1..23: mol_type = other RNA
tagccatcaattctaatgcagga

SEQ ID NO: 136 - RNA, 23 nt, synthetic construct
  source 1..23: mol_type = other RNA
ttcgattagttagagagccagta

SEQ ID NO: 137 - RNA, 23 nt, synthetic construct
  source 1..23: mol_type = other RNA
tgctttacatttttcttcttcct

SEQ ID NO: 138 - RNA, 23 nt, synthetic construct
  source 1..23: mol_type = other RNA
tgatctgtcattgtataaaactg

SEQ ID NO: 139 - RNA, 23 nt, synthetic construct
  source 1..23: mol_type = other RNA
tagattcttggagttttgctagt

SEQ ID NO: 140 - RNA, 23 nt, synthetic construct
  source 1..23: mol_type = other RNA
ttgggtgatcgattagttagaga

SEQ ID NO: 141 - RNA, 23 nt, synthetic construct
  source 1..23: mol_type = other RNA
tatcgattagttagagagccagt

SEQ ID NO: 142 - RNA, 23 nt, synthetic construct
  source 1..23: mol_type = other RNA
ttattaatgagtcatactcttct

SEQ ID NO: 143 - RNA, 23 nt, synthetic construct
  source 1..23: mol_type = other RNA
tagttcaaaaattggaaaattcc

SEQ ID NO: 144 - RNA, 23 nt, synthetic construct
  source 1..23: mol_type = other RNA
tgttcaaaaattggaaaattcca

SEQ ID NO: 145 - RNA, 23 nt, synthetic construct
  source 1..23: mol_type = other RNA
ttgaaataaggtatacataacct

SEQ ID NO: 146 - RNA, 23 nt, synthetic construct
  source 1..23: mol_type = other RNA
ttttctacaagttcaaaaattgg

SEQ ID NO: 147 - RNA, 23 nt, synthetic construct
  source 1..23: mol_type = other RNA
tcttgaaataaggtatacataac

SEQ ID NO: 148 - RNA, 23 nt, synthetic construct
  source 1..23: mol_type = other RNA
ttagatagcatccttgacttgaa

SEQ ID NO: 149 - RNA, 23 nt, synthetic construct
  source 1..23: mol_type = other RNA
tcataagtttgaatgattctttc

SEQ ID NO: 150 - RNA, 23 nt, synthetic construct
  source 1..23: mol_type = other RNA
tttcgaagaaatataagcaattc

SEQ ID NO: 151 - RNA, 23 nt, synthetic construct
  source 1..23: mol_type = other RNA
tataaggaatgtctcgatagcca

SEQ ID NO: 152 - RNA, 23 nt, synthetic construct
  source 1..23: mol_type = other RNA
tgataaaagattcttggagtttt

SEQ ID NO: 153 - RNA, 23 nt, synthetic construct
  source 1..23: mol_type = other RNA
ttcaaaaattggaaaattccagt

SEQ ID NO: 154 - RNA, 23 nt, synthetic construct
  source 1..23: mol_type = other RNA
ttaagtttgaatgattctttcga

SEQ ID NO: 155 - RNA, 23 nt, synthetic construct
  source 1..23: mol_type = other RNA
tttttaaatatttccaataaacc

SEQ ID NO: 156 - RNA, 23 nt, synthetic construct
  source 1..23: mol_type = other RNA
tataaaagattcttggagttttg

SEQ ID NO: 157 - RNA, 23 nt, synthetic construct
  source 1..23: mol_type = other RNA
tgagaaaatgttttcttcttcac

SEQ ID NO: 158 - RNA, 23 nt, synthetic construct
  source 1..23: mol_type = other RNA
ttgtatctaattcttcaccgtct

SEQ ID NO: 159 - RNA, 23 nt, synthetic construct
  source 1..23: mol_type = other RNA
tactattcctatttagtcccttg

SEQ ID NO: 160 - RNA, 23 nt, synthetic construct
  source 1..23: mol_type = other RNA
tttagattgttttccatttcttc

SEQ ID NO: 161 - RNA, 23 nt, synthetic construct
  source 1..23: mol_type = other RNA
tgtgatacagaagatgacctttg

SEQ ID NO: 162 - RNA, 23 nt, synthetic construct
  source 1..23: mol_type = other RNA
taacgatccatgaatggactgat

SEQ ID NO: 163 - RNA, 23 nt, synthetic construct
  source 1..23: mol_type = other RNA
tcaagttcaaaaattggaaaatt

SEQ ID NO: 164 - RNA, 23 nt, synthetic construct
  source 1..23: mol_type = other RNA
tatagttcataaattgttgagtg

SEQ ID NO: 165 - RNA, 23 nt, synthetic construct
  source 1..23: mol_type = other RNA
tgaagaaatataagcaattcgcc

SEQ ID NO: 166 - RNA, 23 nt, synthetic construct
  source 1..23: mol_type = other RNA
tcgaagaaatataagcaattcgc

SEQ ID NO: 167 - RNA, 23 nt, synthetic construct
  source 1..23: mol_type = other RNA
tttctacaagttcaaaaattgga

SEQ ID NO: 168 - RNA, 23 nt, synthetic construct
  source 1..23: mol_type = other RNA
ttttacatttttcttcttcctct

SEQ ID NO: 169 - RNA, 23 nt, synthetic construct
  source 1..23: mol_type = other RNA
ttgataatgaggcttataccatt

SEQ ID NO: 170 - RNA, 21 nt, synthetic construct
  source 1..21: mol_type = other RNA
  modified_base 1: mod_base = OTHER; note = 2'-O-methyladenosine with a 3'-phosphorothioate linkage
  modified_base 2: mod_base = OTHER; note = 2'-O-methyladenosine with a 3'-phosphorothioate linkage
  modified_base 3: mod_base = cm
  modified_base 4: mod_base = um
  modified_base 5: mod_base = um
  modified_base 6: mod_base = gm
  modified_base 7: mod_base = um
  modified_base 8: mod_base = OTHER; note = 2'-O-methyladenosine
  modified_base 9: mod_base = OTHER; note = 2'-fluoroguanosine
  modified_base 10: mod_base = OTHER; note = 2'-fluoroadenosine
  modified_base 11: mod_base = OTHER; note = 2'-fluoroadenosine
  modified_base 12: mod_base = OTHER; note = 2'-O-methyladenosine
  modified_base 13: mod_base = OTHER; note = 2'-O-methyladenosine
  modified_base 14: mod_base = gm
  modified_base 15: mod_base = OTHER; note = 2'-O-methyladenosine
  modified_base 16: mod_base = um
  modified_base 17: mod_base = gm
  modified_base 18: mod_base = gm
  modified_base 19: mod_base = OTHER; note = 2'-O-methylguanosine with a 3'-phosphorothioate linkage
  modified_base 20: mod_base = OTHER; note = 2'-O-methyladenosine with a 3'-phosphorothioate linkage
  modified_base 21: mod_base = OTHER; note = 2'-O-methyladenosine
aacttgtagaaaagatgggaa

SEQ ID NO: 171 - RNA, 21 nt, synthetic construct
  source 1..21: mol_type = other RNA
  modified_base 1: mod_base = OTHER; note = 2'-O-methyladenosine with a 3'-phosphorothioate linkage
  modified_base 2: mod_base = OTHER; note = 2'-O-methylcytidine with a 3'-phosphorothioate linkage
  modified_base 3: mod_base = cm
  modified_base 4: mod_base = OTHER; note = 2'-O-methyladenosine
  modified_base 5: mod_base = cm
  modified_base 6: mod_base = OTHER; note = 2'-O-methyladenosine
  modified_base 7: mod_base = OTHER; note = 2'-O-methyladenosine
  modified_base 8: mod_base = gm
  modified_base 9: mod_base = OTHER; note = 2'-fluoroadenosine
  modified_base 10: mod_base = OTHER; note = 2'-fluorouridine
  modified_base 11: mod_base = OTHER; note = 2'-fluoroadenosine
  modified_base 12: mod_base = um
  modified_base 13: mod_base = gm
  modified_base 14: mod_base = gm
  modified_base 15: mod_base = OTHER; note = 2'-O-methyladenosine
  modified_base 16: mod_base = OTHER; note = 2'-O-methyladenosine
  modified_base 17: mod_base = gm
  modified_base 18: mod_base = gm
  modified_base 19: mod_base = OTHER; note = 2'-O-methyladenosine with a 3'-phosphorothioate linkage
  modified_base 20: mod_base = OTHER; note = 2'-O-methyladenosine with a 3'-phosphorothioate linkage
  modified_base 21: mod_base = OTHER; note = 2'-O-methyladenosine
accacaagatatggaaggaaa

SEQ ID NO: 172 - RNA, 21 nt, synthetic construct
  source 1..21: mol_type = other RNA
  modified_base 1: mod_base = OTHER; note = 2'-O-methyladenosine with a 3'-phosphorothioate linkage
  modified_base 2: mod_base = OTHER; note = 2'-O-methylcytidine with a 3'-phosphorothioate linkage
  modified_base 3: mod_base = um
  modified_base 4: mod_base = OTHER; note = 2'-O-methyladenosine
  modified_base 5: mod_base = gm
  modified_base 6: mod_base = cm
  modified_base 7: mod_base = OTHER; note = 2'-O-methyladenosine
  modified_base 8: mod_base = OTHER; note = 2'-O-methyladenosine
  modified_base 9: mod_base = OTHER; note = 2'-fluoroadenosine
  modified_base 10: mod_base = OTHER; note = 2'-fluoroadenosine
  modified_base 11: mod_base = OTHER; note = 2'-fluorocytidine
  modified_base 12: mod_base = um
  modified_base 13: mod_base = cm
  modified_base 14: mod_base = cm
  modified_base 15: mod_base = OTHER; note = 2'-O-methyladenosine
  modified_base 16: mod_base = OTHER; note = 2'-O-methyladenosine
  modified_base 17: mod_base = gm
  modified_base 18: mod_base = OTHER; note = 2'-O-methyladenosine
  modified_base 19: mod_base = OTHER; note = 2'-O-methyladenosine with a 3'-phosphorothioate linkage
  modified_base 20: mod_base = OTHER; note = 2'-O-methyluridine with a 3'-phosphorothioate linkage
  modified_base 21: mod_base = OTHER; note = 2'-O-methyladenosine
actagcaaaactccaagaata

SEQ ID NO: 173 - RNA, 21 nt, synthetic construct
  source 1..21: mol_type = other RNA
  modified_base 1: mod_base = OTHER; note = 2'-O-methyladenosine with a 3'-phosphorothioate linkage
  modified_base 2: mod_base = OTHER; note = 2'-O-methylcytidine with a 3'-phosphorothioate linkage
  modified_base 3: mod_base = um
  modified_base 4: mod_base = gm
  modified_base 5: mod_base = gm
  modified_base 6: mod_base = cm
  modified_base 7: mod_base = um
  modified_base 8: mod_base = cm
  modified_base 9: mod_base = OTHER; note = 2'-fluorouridine
  modified_base 10: mod_base = OTHER; note = 2'-fluorocytidine
  modified_base 11: mod_base = OTHER; note = 2'-fluorouridine
  modified_base 12: mod_base = OTHER; note = 2'-O-methyladenosine
  modified_base 13: mod_base = OTHER; note = 2'-O-methyladenosine
  modified_base 14: mod_base = cm
  modified_base 15: mod_base = um
  modified_base 16: mod_base = OTHER; note = 2'-O-methyladenosine
  modified_base 17: mod_base = OTHER; note = 2'-O-methyladenosine
  modified_base 18: mod_base = um
  modified_base 19: mod_base = OTHER; note = 2'-O-methylcytidine with a 3'-phosphorothioate linkage
  modified_base 20: mod_base = OTHER; note = 2'-O-methylguanosine with a 3'-phosphorothioate linkage
  modified_base 21: mod_base = OTHER; note = 2'-O-methyladenosine
actggctctctaactaatcga

SEQ ID NO: 174 - RNA, 21 nt, synthetic construct
  source 1..21: mol_type = other RNA
  modified_base 1: mod_base = OTHER; note = 2'-O-methylcytidine with a 3'-phosphorothioate linkage
  modified_base 2: mod_base = OTHER; note = 2'-O-methyladenosine with a 3'-phosphorothioate linkage
  modified_base 3: mod_base = OTHER; note = 2'-O-methyladenosine
  modified_base 4: mod_base = OTHER; note = 2'-O-methyladenosine
  modified_base 5: mod_base = OTHER; note = 2'-O-methyladenosine
  modified_base 6: mod_base = cm
  modified_base 7: mod_base = um
  modified_base 8: mod_base = cm
  modified_base 9: mod_base = OTHER; note = 2'-fluorocytidine
  modified_base 10: mod_base = OTHER; note = 2'-fluoroadenosine
  modified_base 11: mod_base = OTHER; note = 2'-fluoroadenosine
  modified_base 12: mod_base = gm
  modified_base 13: mod_base = OTHER; note = 2'-O-methyladenosine
  modified_base 14: mod_base = OTHER; note = 2'-O-methyladenosine
  modified_base 15: mod_base = um
  modified_base 16: mod_base = cm
  modified_base 17: mod_base = um
  modified_base 18: mod_base = um
  modified_base 19: mod_base = OTHER; note = 2'-O-methyluridine with a 3'-phosphorothioate linkage
  modified_base 20: mod_base = OTHER; note = 2'-O-methyluridine with a 3'-phosphorothioate linkage
  modified_base 21: mod_base = OTHER; note = 2'-O-methyladenosine
caaaactccaagaatctttta

SEQ ID NO: 175 - RNA, 21 nt, synthetic construct
  source 1..21: mol_type = other RNA
  modified_base 1: mod_base = OTHER; note = 2'-O-methylcytidine with a 3'-phosphorothioate linkage
  modified_base 2: mod_base = OTHER; note = 2'-O-methylcytidine with a 3'-phosphorothioate linkage
  modified_base 3: mod_base = cm
  modified_base 4: mod_base = cm
  modified_base 5: mod_base = gm
  modified_base 6: mod_base = gm
  modified_base 7: mod_base = OTHER; note = 2'-O-methyladenosine
  modified_base 8: mod_base = gm
  modified_base 9: mod_base = OTHER; note = 2'-fluoroguanosine
  modified_base 10: mod_base = OTHER; note = 2'-fluoroadenosine
  modified_base 11: mod_base = OTHER; note = 2'-fluoroguanosine
  modified_base 12: mod_base = gm
  modified_base 13: mod_base = um
  modified_base 14: mod_base = cm
  modified_base 15: mod_base = cm
  modified_base 16: mod_base = OTHER; note = 2'-O-methyladenosine
  modified_base 17: mod_base = gm
  modified_base 18: mod_base = cm
  modified_base 19: mod_base = OTHER; note = 2'-O-methyluridine with a 3'-phosphorothioate linkage
  modified_base 20: mod_base = OTHER; note = 2'-O-methylguanosine with a 3'-phosphorothioate linkage
  modified_base 21: mod_base = OTHER; note = 2'-O-methyladenosine
ccccggaggaggtccagctga

SEQ ID NO: 176 - RNA, 21 nt, synthetic construct
  source 1..21: mol_type = other RNA
  modified_base 1: mod_base = OTHER; note = 2'-O-methylcytidine with a 3'-phosphorothioate linkage
  modified_base 2: mod_base = OTHER; note = 2'-O-methylcytidine with a 3'-phosphorothioate linkage
  modified_base 3: mod_base = um
  modified_base 4: mod_base = gm
  modified_base 5: mod_base = cm
  modified_base 6: mod_base = OTHER; note = 2'-O-methyladenosine
  modified_base 7: mod_base = um
  modified_base 8: mod_base = um
  modified_base 9: mod_base = OTHER; note = 2'-fluoroadenosine
  modified_base 10: mod_base = OTHER; note = 2'-fluoroguanosine
  modified_base 11: mod_base = OTHER; note = 2'-fluoroadenosine
  modified_base 12: mod_base = OTHER; note = 2'-O-methyladenosine
  modified_base 13: mod_base = um
  modified_base 14: mod_base = um
  modified_base 15: mod_base = gm
  modified_base 16: mod_base = OTHER; note = 2'-O-methyladenosine
  modified_base 17: mod_base = um
  modified_base 18: mod_base = gm
  modified_base 19: mod_base = OTHER; note = 2'-O-methylguanosine with a 3'-phosphorothioate linkage
  modified_base 20: mod_base = OTHER; note = 2'-O-methylcytidine with a 3'-phosphorothioate linkage
  modified_base 21: mod_base = OTHER; note = 2'-O-methyladenosine
cctgcattagaattgatggca

SEQ ID NO: 177 - RNA, 21 nt, synthetic construct
  source 1..21: mol_type = other RNA
  modified_base 1: mod_base = OTHER; note = 2'-O-methylcytidine with a 3'-phosphorothioate linkage
  modified_base 2: mod_base = OTHER; note = 2'-O-methyluridine with a 3'-phosphorothioate linkage
  modified_base 3: mod_base = OTHER; note = 2'-O-methyladenosine
  modified_base 4: mod_base = OTHER; note = 2'-O-methyladenosine
  modified_base 5: mod_base = cm
  modified_base 6: mod_base = um
  modified_base 7: mod_base = OTHER; note = 2'-O-methyladenosine
  modified_base 8: mod_base = OTHER; note = 2'-O-methyladenosine
  modified_base 9: mod_base = OTHER; note = 2'-fluorouridine
  modified_base 10: mod_base = OTHER; note = 2'-fluorocytidine
  modified_base 11: mod_base = OTHER; note = 2'-fluoroguanosine
  modified_base 12: mod_base = OTHER; note = 2'-O-methyladenosine
  modified_base 13: mod_base = um
  modified_base 14: mod_base = cm
  modified_base 15: mod_base = OTHER; note = 2'-O-methyladenosine
  modified_base 16: mod_base = cm
  modified_base 17: mod_base = cm
  modified_base 18: mod_base = cm
  modified_base 19: mod_base = OTHER; note = 2'-O-methyladenosine with a 3'-phosphorothioate linkage
  modified_base 20: mod_base = OTHER; note = 2'-O-methyluridine with a 3'-phosphorothioate linkage
  modified_base 21: mod_base = OTHER; note = 2'-O-methyladenosine
ctaactaatcgatcacccata

SEQ ID NO: 178 - RNA, 21 nt, synthetic construct
  source 1..21: mol_type = other RNA
  modified_base 1: mod_base = OTHER; note = 2'-O-methylcytidine with a 3'-phosphorothioate linkage
  modified_base 2: mod_base = OTHER; note = 2'-O-methyluridine with a 3'-phosphorothioate linkage
  modified_base 3: mod_base = cm
  modified_base 4: mod_base = OTHER; note = 2'-O-methyladenosine
  modified_base 5: mod_base = OTHER; note = 2'-O-methyladenosine
  modified_base 6: mod_base = cm
  modified_base 7: mod_base = um
  modified_base 8: mod_base = OTHER; note = 2'-O-methyladenosine
  modified_base 9: mod_base = OTHER; note = 2'-fluoroguanosine
  modified_base 10: mod_base = OTHER; note = 2'-fluorocytidine
  modified_base 11: mod_base = OTHER; note = 2'-fluoroadenosine
  modified_base 12: mod_base = OTHER; note = 2'-O-methyladenosine
  modified_base 13: mod_base = OTHER; note = 2'-O-methyladenosine
  modified_base 14: mod_base = OTHER; note = 2'-O-methyladenosine
  modified_base 15: mod_base = cm
  modified_base 16: mod_base = um
  modified_base 17: mod_base = cm
  modified_base 18: mod_base = cm
  modified_base 19: mod_base = OTHER; note = 2'-O-methyladenosine with a 3'-phosphorothioate linkage
  modified_base 20: mod_base = OTHER; note = 2'-O-methyladenosine with a 3'-phosphorothioate linkage
  modified_base 21: mod_base = OTHER; note = 2'-O-methyladenosine
ctcaactagcaaaactccaaa

SEQ ID NO: 179 - RNA, 21 nt, synthetic construct
  source 1..21: mol_type = other RNA
  modified_base 1: mod_base = OTHER; note = 2'-O-methylcytidine with a 3'-phosphorothioate linkage
  modified_base 2: mod_base = OTHER; note = 2'-O-methyluridine with a 3'-phosphorothioate linkage
  modified_base 3: mod_base = cm
  modified_base 4: mod_base = um
  modified_base 5: mod_base = cm
  modified_base 6: mod_base = um
  modified_base 7: mod_base = OTHER; note = 2'-O-methyladenosine
  modified_base 8: mod_base = OTHER; note = 2'-O-methyladenosine
  modified_base 9: mod_base = OTHER; note = 2'-fluorocytidine
  modified_base 10: mod_base = OTHER; note = 2'-fluorouridine
  modified_base 11: mod_base = OTHER; note = 2'-fluoroadenosine
  modified_base 12: mod_base = OTHER; note = 2'-O-methyladenosine
  modified_base 13: mod_base = um
  modified_base 14: mod_base = cm
  modified_base 15: mod_base = gm
  modified_base 16: mod_base = OTHER; note = 2'-O-methyladenosine
  modified_base 17: mod_base = um
  modified_base 18: mod_base = cm
  modified_base 19: mod_base = OTHER; note = 2'-O-methyladenosine with a 3'-phosphorothioate linkage
  modified_base 20: mod_base = OTHER; note = 2'-O-methylcytidine with a 3'-phosphorothioate linkage
  modified_base 21: mod_base = OTHER; note = 2'-O-methyladenosine
ctctctaactaatcgatcaca

SEQ ID NO: 180 - RNA, 21 nt, synthetic construct
  source 1..21: mol_type = other RNA
  modified_base 1: mod_base = OTHER; note = 2'-O-methylcytidine with a 3'-phosphorothioate linkage
  modified_base 2: mod_base = OTHER; note = 2'-O-methyluridine with a 3'-phosphorothioate linkage
  modified_base 3: mod_base = gm
  modified_base 4: mod_base = cm
  modified_base 5: mod_base = OTHER; note = 2'-O-methyladenosine
  modified_base 6: mod_base = um
  modified_base 7: mod_base = um
  modified_base 8: mod_base = OTHER; note = 2'-O-methyladenosine
  modified_base 9: mod_base = OTHER; note = 2'-fluoroguanosine
  modified_base 10: mod_base = OTHER; note = 2'-fluoroadenosine
  modified_base 11: mod_base = OTHER; note = 2'-fluoroadenosine
  modified_base 12: mod_base = um
  modified_base 13: mod_base = um
  modified_base 14: mod_base = gm
  modified_base 15: mod_base = OTHER; note = 2'-O-methyladenosine
  modified_base 16: mod_base = um
  modified_base 17: mod_base = gm
  modified_base 18: mod_base = gm
  modified_base 19: mod_base = OTHER; note = 2'-O-methylcytidine with a 3'-phosphorothioate linkage
  modified_base 20: mod_base = OTHER; note = 2'-O-methyluridine with a 3'-phosphorothioate linkage
  modified_base 21: mod_base = OTHER; note = 2'-O-methyladenosine
ctgcattagaattgatggcta

SEQ ID NO: 181 - RNA, 21 nt, synthetic construct
  source 1..21: mol_type = other RNA
  modified_base 1: mod_base = OTHER; note = 2'-O-methylcytidine with a 3'-phosphorothioate linkage
  modified_base 2: mod_base = OTHER; note = 2'-O-methyluridine with a 3'-phosphorothioate linkage
  modified_base 3: mod_base = gm
  modified_base 4: mod_base = gm
  modified_base 5: mod_base = cm
  modified_base 6: mod_base = um
  modified_base 7: mod_base = cm
  modified_base 8: mod_base = um
  modified_base 9: mod_base = OTHER; note = 2'-fluorocytidine
  modified_base 10: mod_base = OTHER; note = 2'-fluorouridine
  modified_base 11: mod_base = OTHER; note = 2'-fluoroadenosine
  modified_base 12: mod_base = OTHER; note = 2'-O-methyladenosine
  modified_base 13: mod_base = cm
  modified_base 14: mod_base = um
  modified_base 15: mod_base = OTHER; note = 2'-O-methyladenosine
  modified_base 16: mod_base = OTHER; note = 2'-O-methyladenosine
  modified_base 17: mod_base = um
  modified_base 18: mod_base = cm
  modified_base 19: mod_base = OTHER; note = 2'-O-methylguanosine with a 3'-phosphorothioate linkage
  modified_base 20: mod_base = OTHER; note = 2'-O-methyladenosine with a 3'-phosphorothioate linkage
  modified_base 21: mod_base = OTHER; note = 2'-O-methyladenosine
ctggctctctaactaatcgaa

SEQ ID NO: 182 - RNA, 21 nt, synthetic construct
  source 1..21: mol_type = other RNA
  modified_base 1: mod_base = OTHER; note = 2'-O-methylguanosine with a 3'-phosphorothioate linkage
  modified_base 2: mod_base = OTHER; note = 2'-O-methyladenosine with a 3'-phosphorothioate linkage
  modified_base 3: mod_base = OTHER; note = 2'-O-methyladenosine
  modified_base 4: mod_base = gm
  modified_base 5: mod_base = OTHER; note = 2'-O-methyladenosine
  modified_base 6: mod_base = OTHER; note = 2'-O-methyladenosine
  modified_base 7: mod_base = gm
  modified_base 8: mod_base = OTHER; note = 2'-O-methyladenosine
  modified_base 9: mod_base = OTHER; note = 2'-fluoroadenosine
  modified_base 10: mod_base = OTHER; note = 2'-fluoroadenosine
  modified_base 11: mod_base = OTHER; note = 2'-fluoroadenosine
  modified_base 12: mod_base = OTHER; note = 2'-O-methyladenosine
  modified_base 13: mod_base = um
  modified_base 14: mod_base = gm
  modified_base 15: mod_base = um
  modified_base 16: mod_base = OTHER; note = 2'-O-methyladenosine
  modified_base 17: mod_base = OTHER; note = 2'-O-methyladenosine
  modified_base 18: mod_base = OTHER; note = 2'-O-methyladenosine
  modified_base 19: mod_base = OTHER; note = 2'-O-methylguanosine with a 3'-phosphorothioate linkage
  modified_base 20: mod_base = OTHER; note = 2'-O-methylcytidine with a 3'-phosphorothioate linkage
  modified_base 21: mod_base = OTHER; note = 2'-O-methyladenosine
gaagaagaaaaatgtaaagca

SEQ ID NO: 183 - RNA, 21 nt, synthetic construct
  source 1..21: mol_type = other RNA
  modified_base 1: mod_base = OTHER; note = 2'-O-methylguanosine with a 3'-phosphorothioate linkage
  modified_base 2: mod_base = OTHER; note = 2'-O-methyluridine with a 3'-phosphorothioate linkage
  modified_base 3: mod_base = um
  modified_base 4: mod_base = um
  modified_base 5: mod_base = um
  modified_base 6: mod_base = OTHER; note = 2'-O-methyladenosine
  modified_base 7: mod_base = um
  modified_base 8: mod_base = OTHER; note = 2'-O-methyladenosine
  modified_base 9: mod_base = OTHER; note = 2'-fluorocytidine
  modified_base 10: mod_base = OTHER; note = 2'-fluoroadenosine
  modified_base 11: mod_base = OTHER; note = 2'-fluoroadenosine
  modified_base 12: mod_base = um
  modified_base 13: mod_base = gm
  modified_base 14: mod_base = OTHER; note = 2'-O-methyladenosine
  modified_base 15: mod_base = cm
  modified_base 16: mod_base = OTHER; note = 2'-O-methyladenosine
  modified_base 17: mod_base = gm
  modified_base 18: mod_base = OTHER; note = 2'-O-methyladenosine
  modified_base 19: mod_base = OTHER; note = 2'-O-methyluridine with a 3'-phosphorothioate linkage
  modified_base 20: mod_base = OTHER; note = 2'-O-methylcytidine with a 3'-phosphorothioate linkage
  modified_base 21: mod_base = OTHER; note = 2'-O-methyladenosine
gttttatacaatgacagatca

SEQ ID NO: 184 - RNA, 21 nt, synthetic construct
  source 1..21: mol_type = other RNA
  modified_base 1: mod_base = OTHER; note = 2'-O-methyluridine with a 3'-phosphorothioate linkage
  modified_base 2: mod_base = OTHER; note = 2'-O-methyladenosine with a 3'-phosphorothioate linkage
  modified_base 3: mod_base = gm
  modified_base 4: mod_base = cm
  modified_base 5: mod_base = OTHER; note = 2'-O-methyladenosine
  modified_base 6: mod_base = OTHER; note = 2'-O-methyladenosine
  modified_base 7: mod_base = OTHER; note = 2'-O-methyladenosine
  modified_base 8: mod_base = OTHER; note = 2'-O-methyladenosine
  modified_base 9: mod_base = OTHER; note = 2'-fluorocytidine
  modified_base 10: mod_base = OTHER; note = 2'-fluorouridine
  modified_base 11: mod_base = OTHER; note = 2'-fluorocytidine
  modified_base 12: mod_base = cm
  modified_base 13: mod_base = OTHER; note = 2'-O-methyladenosine
  modified_base 14: mod_base = OTHER; note = 2'-O-methyladenosine
  modified_base 15: mod_base = gm
  modified_base 16: mod_base = OTHER; note = 2'-O-methyladenosine
  modified_base 17: mod_base = OTHER; note = 2'-O-methyladenosine
  modified_base 18: mod_base = um
  modified_base 19: mod_base = OTHER; note = 2'-O-methylcytidine with a 3'-phosphorothioate linkage
  modified_base 20: mod_base = OTHER; note = 2'-O-methyluridine with a 3'-phosphorothioate linkage
  modified_base 21: mod_base = OTHER; note = 2'-O-methyladenosine
tagcaaaactccaagaatcta

SEQ ID NO: 185 - RNA, 21 nt, synthetic construct
  source 1..21: mol_type = other RNA
  modified_base 1: mod_base = OTHER; note = 2'-O-methyluridine with a 3'-phosphorothioate linkage
  modified_base 2: mod_base = OTHER; note = 2'-O-methylcytidine with a 3'-phosphorothioate linkage
  modified_base 3: mod_base = um
  modified_base 4: mod_base = OTHER; note = 2'-O-methyladenosine
  modified_base 5: mod_base = OTHER; note = 2'-O-methyladenosine
  modified_base 6: mod_base = cm
  modified_base 7: mod_base = um
  modified_base 8: mod_base = OTHER; note = 2'-O-methyladenosine
  modified_base 9: mod_base = OTHER; note = 2'-fluoroadenosine
  modified_base 10: mod_base = OTHER; note = 2'-fluorouridine
  modified_base 11: mod_base = OTHER; note = 2'-fluorocytidine
  modified_base 12: mod_base = gm
  modified_base 13: mod_base = OTHER; note = 2'-O-methyladenosine
  modified_base 14: mod_base = um
  modified_base 15: mod_base = cm
  modified_base 16: mod_base = OTHER; note = 2'-O-methyladenosine
  modified_base 17: mod_base = cm
  modified_base 18: mod_base = cm
  modified_base 19: mod_base = OTHER; note = 2'-O-methylcytidine with a 3'-phosphorothioate linkage
  modified_base 20: mod_base = OTHER; note = 2'-O-methyladenosine with a 3'-phosphorothioate linkage
  modified_base 21: mod_base = OTHER; note = 2'-O-methyladenosine
tctaactaatcgatcacccaa

SEQ ID NO: 186 - RNA, 21 nt, synthetic construct
  source 1..21: mol_type = other RNA
  modified_base 1: mod_base = OTHER; note = 2'-O-methyluridine with a 3'-phosphorothioate linkage
  modified_base 2: mod_base = OTHER; note = 2'-O-methylguanosine with a 3'-phosphorothioate linkage
  modified_base 3: mod_base = gm
  modified_base 4: mod_base = cm
  modified_base 5: mod_base = um
  modified_base 6: mod_base = cm
  modified_base 7: mod_base = um
  modified_base 8: mod_base = cm
  modified_base 9: mod_base = OTHER; note = 2'-fluorouridine
  modified_base 10: mod_base = OTHER; note = 2'-fluoroadenosine
  modified_base 11: mod_base = OTHER; note = 2'-fluoroadenosine
  modified_base 12: mod_base = cm
  modified_base 13: mod_base = um
  modified_base 14: mod_base = OTHER; note = 2'-O-methyladenosine
  modified_base 15: mod_base = OTHER; note = 2'-O-methyladenosine
  modified_base 16: mod_base = um
  modified_base 17: mod_base = cm
  modified_base 18: mod_base = gm
  modified_base 19: mod_base = OTHER; note = 2'-O-methyladenosine with a 3'-phosphorothioate linkage
  modified_base 20: mod_base = OTHER; note = 2'-O-methyluridine with a 3'-phosphorothioate linkage
  modified_base 21: mod_base = OTHER; note = 2'-O-methyladenosine
tggctctctaactaatcgata

SEQ ID NO: 187 - RNA, 21 nt, synthetic construct
  source 1..21: mol_type = other RNA
  modified_base 1: mod_base = OTHER; note = 2'-O-methyladenosine with a 3'-phosphorothioate linkage
  modified_base 2: mod_base = OTHER; note = 2'-O-methyladenosine with a 3'-phosphorothioate linkage
  modified_base 3: mod_base = gm
  modified_base 4: mod_base = OTHER; note = 2'-O-methyladenosine
  modified_base 5: mod_base = gm
  modified_base 6: mod_base = um
  modified_base 7: mod_base = OTHER; note = 2'-O-methyladenosine
  modified_base 8: mod_base = um
  modified_base 9: mod_base = OTHER; note = 2'-fluoroguanosine
  modified_base 10: mod_base = OTHER; note = 2'-fluoroadenosine
  modified_base 11: mod_base = OTHER; note = 2'-fluorocytidine
  modified_base 12: mod_base = um
  modified_base 13: mod_base = cm
  modified_base 14: mod_base = OTHER; note = 2'-O-methyladenosine
  modified_base 15: mod_base = um
  modified_base 16: mod_base = um
  modified_base 17: mod_base = OTHER; note = 2'-O-methyladenosine
  modified_base 18: mod_base = OTHER; note = 2'-O-methyladenosine
  modified_base 19: mod_base = OTHER; note = 2'-O-methyluridine with a 3'-phosphorothioate linkage
  modified_base 20: mod_base = OTHER; note = 2'-O-methyladenosine with a 3'-phosphorothioate linkage
  modified_base 21: mod_base = OTHER; note = 2'-O-methyladenosine
aagagtatgactcattaataa

SEQ ID NO: 188 - RNA, 21 nt, synthetic construct
  source 1..21: mol_type = other RNA
  modified_base 1: mod_base = OTHER; note = 2'-O-methyladenosine with a 3'-phosphorothioate linkage
  modified_base 2: mod_base = OTHER; note = 2'-O-methyladenosine with a 3'-phosphorothioate linkage
  modified_base 3: mod_base = um
  modified_base 4: mod_base = um
  modified_base 5: mod_base = um
  modified_base 6: mod_base = um
  modified_base 7: mod_base = cm
  modified_base 8: mod_base = cm
  modified_base 9: mod_base = OTHER; note = 2'-fluoroadenosine
  modified_base 10: mod_base = OTHER; note = 2'-fluoroadenosine
  modified_base 11: mod_base = OTHER; note = 2'-fluorouridine
  modified_base 12: mod_base = um
  modified_base 13: mod_base = um
  modified_base 14: mod_base = um
  modified_base 15: mod_base = um
  modified_base 16: mod_base = gm
  modified_base 17: mod_base = OTHER; note = 2'-O-methyladenosine
  modified_base 18: mod_base = OTHER; note = 2'-O-methyladenosine
  modified_base 19: mod_base = OTHER; note = 2'-O-methylcytidine with a 3'-phosphorothioate linkage
  modified_base 20: mod_base = OTHER; note = 2'-O-methyluridine with a 3'-phosphorothioate linkage
  modified_base 21: mod_base = OTHER; note = 2'-O-methyladenosine
aattttccaatttttgaacta

SEQ ID NO: 189 - RNA, 21 nt, synthetic construct
  source 1..21: mol_type = other RNA
  modified_base 1: mod_base = OTHER; note = 2'-O-methylguanosine with a 3'-phosphorothioate linkage
  modified_base 2: mod_base = OTHER; note = 2'-O-methyladenosine with a 3'-phosphorothioate linkage
  modified_base 3: mod_base = OTHER; note = 2'-O-methyladenosine
  modified_base 4: mod_base = um
  modified_base 5: mod_base = um
  modified_base 6: mod_base = um
  modified_base 7: mod_base = um
  modified_base 8: mod_base = cm
  modified_base 9: mod_base = OTHER; note = 2'-fluorocytidine
  modified_base 10: mod_base = OTHER; note = 2'-fluoroadenosine
  modified_base 11: mod_base = OTHER; note = 2'-fluoroadenosine
  modified_base 12: mod_base = um
  modified_base 13: mod_base = um
  modified_base 14: mod_base = um
  modified_base 15: mod_base = um
  modified_base 16: mod_base = um
  modified_base 17: mod_base = gm
  modified_base 18: mod_base = OTHER; note = 2'-O-methyladenosine
  modified_base 19: mod_base = OTHER; note = 2'-O-methyladenosine with a 3'-phosphorothioate linkage
  modified_base 20: mod_base = OTHER; note = 2'-O-methylcytidine with a 3'-phosphorothioate linkage
  modified_base 21: mod_base = OTHER; note = 2'-O-methyladenosine
gaattttccaatttttgaaca

SEQ ID NO: 190 - RNA, 21 nt, synthetic construct
  source 1..21: mol_type = other RNA
  modified_base 1: mod_base = OTHER; note = 2'-O-methylguanosine with a 3'-phosphorothioate linkage
  modified_base 2: mod_base = OTHER; note = 2'-O-methyluridine with a 3'-phosphorothioate linkage
  modified_base 3: mod_base = um
  modified_base 4: mod_base = OTHER; note = 2'-O-methyladenosine
  modified_base 5: mod_base = um
  modified_base 6: mod_base = gm
  modified_base 7: mod_base = um
  modified_base 8: mod_base = OTHER; note = 2'-O-methyladenosine
  modified_base 9: mod_base = OTHER; note = 2'-fluorouridine
  modified_base 10: mod_base = OTHER; note = 2'-fluoroadenosine
  modified_base 11: mod_base = OTHER; note = 2'-fluorocytidine
  modified_base 12: mod_base = cm
  modified_base 13: mod_base = um
  modified_base 14: mod_base = um
  modified_base 15: mod_base = OTHER; note = 2'-O-methyladenosine
  modified_base 16: mod_base = um
  modified_base 17: mod_base = um
  modified_base 18: mod_base = um
  modified_base 19: mod_base = OTHER; note = 2'-O-methylcytidine with a 3'-phosphorothioate linkage
  modified_base 20: mod_base = OTHER; note = 2'-O-methyladenosine with a 3'-phosphorothioate linkage
  modified_base 21: mod_base = OTHER; note = 2'-O-methyladenosine
gttatgtataccttatttcaa

SEQ ID NO: 191 - RNA, 21 nt, synthetic construct
  source 1..21: mol_type = other RNA
  modified_base 1: mod_base = OTHER; note = 2'-O-methyladenosine with a 3'-phosphorothioate linkage
  modified_base 2: mod_base = OTHER; note = 2'-O-methyladenosine with a 3'-phosphorothioate linkage
  modified_base 3: mod_base = um
  modified_base 4: mod_base = um
  modified_base 5: mod_base = um
  modified_base 6: mod_base = um
  modified_base 7: mod_base = um
  modified_base 8: mod_base = gm
  modified_base 9: mod_base = OTHER; note = 2'-fluoroadenosine
  modified_base 10: mod_base = OTHER; note = 2'-fluoroadenosine
  modified_base 11: mod_base = OTHER; note = 2'-fluorocytidine
  modified_base 12: mod_base = um
  modified_base 13: mod_base = um
  modified_base 14: mod_base = gm
  modified_base 15: mod_base = um
  modified_base 16: mod_base = OTHER; note = 2'-O-methyladenosine
  modified_base 17: mod_base = gm
  modified_base 18: mod_base = OTHER; note = 2'-O-methyladenosine
  modified_base 19: mod_base = OTHER; note = 2'-O-methyladenosine with a 3'-phosphorothioate linkage
  modified_base 20: mod_base = OTHER; note = 2'-O-methyladenosine with a 3'-phosphorothioate linkage
  modified_base 21: mod_base = OTHER; note = 2'-O-methyladenosine
aatttttgaacttgtagaaaa

SEQ ID NO: 192 - RNA, 21 nt, synthetic construct
  source 1..21: mol_type = other RNA
  modified_base 1: mod_base = OTHER; note = 2'-O-methyluridine with a 3'-phosphorothioate linkage
  modified_base 2: mod_base = OTHER; note = 2'-O-methyladenosine with a 3'-phosphorothioate linkage
  modified_base 3: mod_base = um
  modified_base 4: mod_base = gm
  modified_base 5: mod_base = um
  modified_base 6: mod_base = OTHER; note = 2'-O-methyladenosine
  modified_base 7: mod_base = um
  modified_base 8: mod_base = OTHER; note = 2'-O-methyladenosine
  modified_base 9: mod_base = OTHER; note = 2'-fluorocytidine
  modified_base 10: mod_base = OTHER; note = 2'-fluorocytidine
  modified_base 11: mod_base = OTHER; note = 2'-fluorouridine
  modified_base 12: mod_base = um
  modified_base 13: mod_base = OTHER; note = 2'-O-methyladenosine
  modified_base 14: mod_base = um
  modified_base 15: mod_base = um
  modified_base 16: mod_base = um
  modified_base 17: mod_base = cm
  modified_base 18: mod_base = OTHER; note = 2'-O-methyladenosine
  modified_base 19: mod_base = OTHER; note = 2'-O-methyladenosine with a 3'-phosphorothioate linkage
  modified_base 20: mod_base = OTHER; note = 2'-O-methylguanosine with a 3'-phosphorothioate linkage
  modified_base 21: mod_base = OTHER; note = 2'-O-methyladenosine
tatgtataccttatttcaaga

SEQ ID NO: 193 - RNA, 21 nt, synthetic construct
  source 1..21: mol_type = other RNA
  modified_base 1: mod_base = OTHER; note = 2'-O-methylcytidine with a 3'-phosphorothioate linkage
  modified_base 2: mod_base = OTHER; note = 2'-O-methyladenosine with a 3'-phosphorothioate linkage
  modified_base 3: mod_base = OTHER; note = 2'-O-methyladenosine
  modified_base 4: mod_base = gm
  modified_base 5: mod_base = um
  modified_base 6: mod_base = cm
  modified_base 7: mod_base = OTHER; note = 2'-O-methyladenosine
  modified_base 8: mod_base = OTHER; note = 2'-O-methyladenosine
  modified_base 9: mod_base = OTHER; note = 2'-fluoroguanosine
  modified_base 10: mod_base = OTHER; note = 2'-fluoroguanosine
  modified_base 11: mod_base = OTHER; note = 2'-fluoroadenosine
  modified_base 12: mod_base = um
  modified_base 13: mod_base = gm
  modified_base 14: mod_base = cm
  modified_base 15: mod_base = um
  modified_base 16: mod_base = OTHER; note = 2'-O-methyladenosine
  modified_base 17: mod_base = um
  modified_base 18: mod_base = cm
  modified_base 19: mod_base = OTHER; note = 2'-O-methyluridine with a 3'-phosphorothioate linkage
  modified_base 20: mod_base = OTHER; note = 2'-O-methyladenosine with a 3'-phosphorothioate linkage
  modified_base 21: mod_base = OTHER; note = 2'-O-methyladenosine
caagtcaaggatgctatctaa

SEQ ID NO: 194 - RNA, 21 nt, synthetic construct
  source 1..21: mol_type = other RNA
  modified_base 1: mod_base = OTHER; note = 2'-O-methyladenosine with a 3'-phosphorothioate linkage
  modified_base 2: mod_base = OTHER; note = 2'-O-methyladenosine with a 3'-phosphorothioate linkage
  modified_base 3: mod_base = gm
  modified_base 4: mod_base = OTHER; note = 2'-O-methyladenosine
  modified_base 5: mod_base = OTHER; note = 2'-O-methyladenosine
  modified_base 6: mod_base = um
  modified_base 7: mod_base = cm
  modified_base 8: mod_base = OTHER; note = 2'-O-methyladenosine
  modified_base 9: mod_base = OTHER; note = 2'-fluorouridine
  modified_base 10: mod_base = OTHER; note = 2'-fluorouridine
  modified_base 11: mod_base = OTHER; note = 2'-fluorocytidine
  modified_base 12: mod_base = OTHER; note = 2'-O-methyladenosine
  modified_base 13: mod_base = OTHER; note = 2'-O-methyladenosine
  modified_base 14: mod_base = OTHER; note = 2'-O-methyladenosine
  modified_base 15: mod_base = cm
  modified_base 16: mod_base = um
  modified_base 17: mod_base = um
  modified_base 18: mod_base = OTHER; note = 2'-O-methyladenosine
  modified_base 19: mod_base = OTHER; note = 2'-O-methyluridine with a 3'-phosphorothioate linkage
  modified_base 20: mod_base = OTHER; note = 2'-O-methylguanosine with a 3'-phosphorothioate linkage
  modified_base 21: mod_base = OTHER; note = 2'-O-methyladenosine
aagaatcattcaaacttatga

SEQ ID NO: 195 - RNA, 21 nt, synthetic construct
  source 1..21: mol_type = other RNA
  modified_base 1: mod_base = OTHER; note = 2'-O-methyladenosine with a 3'-phosphorothioate linkage
  modified_base 2: mod_base = OTHER; note = 2'-O-methyluridine with a 3'-phosphorothioate linkage
  modified_base 3: mod_base = um
  modified_base 4: mod_base = gm
  modified_base 5: mod_base = cm
  modified_base 6: mod_base = um
  modified_base 7: mod_base = um
  modified_base 8: mod_base = OTHER; note = 2'-O-methyladenosine
  modified_base 9: mod_base = OTHER; note = 2'-fluorouridine
  modified_base 10: mod_base = OTHER; note = 2'-fluoroadenosine
  modified_base 11: mod_base = OTHER; note = 2'-fluorouridine
  modified_base 12: mod_base = um
  modified_base 13: mod_base = um
  modified_base 14: mod_base = cm
  modified_base 15: mod_base = um
  modified_base 16: mod_base = um
  modified_base 17: mod_base = cm
  modified_base 18: mod_base = gm
  modified_base 19: mod_base = OTHER; note = 2'-O-methyladenosine with a 3'-phosphorothioate linkage
  modified_base 20: mod_base = OTHER; note = 2'-O-methyladenosine with a 3'-phosphorothioate linkage
  modified_base 21: mod_base = OTHER; note = 2'-O-methyladenosine
attgcttatatttcttcgaaa

SEQ ID NO: 196 - RNA, 21 nt, synthetic construct
  source 1..21: mol_type = other RNA
  modified_base 1: mod_base = OTHER; note = 2'-O-methylguanosine with a 3'-phosphorothioate linkage
  modified_base 2: mod_base = OTHER; note = 2'-O-methylcytidine with a 3'-phosphorothioate linkage
  modified_base 3: mod_base = um
  modified_base 4: mod_base = OTHER; note = 2'-O-methyladenosine
  modified_base 5: mod_base = um
  modified_base 6: mod_base = cm
  modified_base 7: mod_base = gm
  modified_base 8: mod_base = OTHER; note = 2'-O-methyladenosine
  modified_base 9: mod_base = OTHER; note = 2'-fluoroguanosine
  modified_base 10: mod_base = OTHER; note = 2'-fluoroadenosine
  modified_base 11: mod_base = OTHER; note = 2'-fluorocytidine
  modified_base 12: mod_base = OTHER; note = 2'-O-methyladenosine
  modified_base 13: mod_base = um
  modified_base 14: mod_base = um
  modified_base 15: mod_base = cm
  modified_base 16: mod_base = cm
  modified_base 17: mod_base = um
  modified_base 18: mod_base = um
  modified_base 19: mod_base = OTHER; note = 2'-O-methyladenosine with a 3'-phosphorothioate linkage
  modified_base 20: mod_base = OTHER; note = 2'-O-methyluridine with a 3'-phosphorothioate linkage
  modified_base 21: mod_base = OTHER; note = 2'-O-methyladenosine
gctatcgagacattccttata

SEQ ID NO: 197 - RNA, 21 nt, synthetic construct
  source 1..21: mol_type = other RNA
  modified_base 1: mod_base = OTHER; note = 2'-O-methyladenosine with a 3'-phosphorothioate linkage
  modified_base 2: mod_base = OTHER; note = 2'-O-methyladenosine with a 3'-phosphorothioate linkage
  modified_base 3: mod_base = cm
  modified_base 4: mod_base = um
  modified_base 5: mod_base = cm
  modified_base 6: mod_base = cm
  modified_base 7: mod_base = OTHER; note = 2'-O-methyladenosine
  modified_base 8: mod_base = OTHER; note = 2'-O-methyladenosine
  modified_base 9: mod_base = OTHER; note = 2'-fluoroguanosine
  modified_base 10: mod_base = OTHER; note = 2'-fluoroadenosine
  modified_base 11: mod_base = OTHER; note = 2'-fluoroadenosine
  modified_base 12: mod_base = um
  modified_base 13: mod_base = cm
  modified_base 14: mod_base = um
  modified_base 15: mod_base = um
  modified_base 16: mod_base = um
  modified_base 17: mod_base = um
  modified_base 18: mod_base = OTHER; note = 2'-O-methyladenosine
  modified_base 19: mod_base = OTHER; note = 2'-O-methyluridine with a 3'-phosphorothioate linkage
  modified_base 20: mod_base = OTHER; note = 2'-O-methylcytidine with a 3'-phosphorothioate linkage
  modified_base 21: mod_base = OTHER; note = 2'-O-methyladenosine
aactccaagaatcttttatca

SEQ ID NO: 198 - RNA, 21 nt, synthetic construct
  source 1..21: mol_type = other RNA
  modified_base 1: mod_base = OTHER; note = 2'-O-methyluridine with a 3'-phosphorothioate linkage
  modified_base 2: mod_base = OTHER; note = 2'-O-methylguanosine with a 3'-phosphorothioate linkage
  modified_base 3: mod_base = gm
  modified_base 4: mod_base = OTHER; note = 2'-O-methyladenosine
  modified_base 5: mod_base = OTHER; note = 2'-O-methyladenosine
  modified_base 6: mod_base = um
  modified_base 7: mod_base = um
  modified_base 8: mod_base = um
  modified_base 9: mod_base = OTHER; note = 2'-fluorouridine
  modified_base 10: mod_base = OTHER; note = 2'-fluorocytidine
  modified_base 11: mod_base = OTHER; note = 2'-fluorocytidine
  modified_base 12: mod_base = OTHER; note = 2'-O-methyladenosine
  modified_base 13: mod_base = OTHER; note = 2'-O-methyladenosine
  modified_base 14: mod_base = um
  modified_base 15: mod_base = um
  modified_base 16: mod_base = um
  modified_base 17: mod_base = um
  modified_base 18: mod_base = um
  modified_base 19: mod_base = OTHER; note = 2'-O-methylguanosine with a 3'-phosphorothioate linkage
  modified_base 20: mod_base = OTHER; note = 2'-O-methyladenosine with a 3'-phosphorothioate linkage
  modified_base 21: mod_base = OTHER; note = 2'-O-methyladenosine
tggaattttccaatttttgaa

SEQ ID NO: 199 - RNA, 21 nt, synthetic construct
  source 1..21: mol_type = other RNA
  modified_base 1: mod_base = OTHER; note = 2'-O-methylguanosine with a 3'-phosphorothioate linkage
  modified_base 2: mod_base = OTHER; note = 2'-O-methyladenosine with a 3'-phosphorothioate linkage
  modified_base 3: mod_base = OTHER; note = 2'-O-methyladenosine
  modified_base 4: mod_base = OTHER; note = 2'-O-methyladenosine
  modified_base 5: mod_base = gm
  modified_base 6: mod_base = OTHER; note = 2'-O-methyladenosine
  modified_base 7: mod_base = OTHER; note = 2'-O-methyladenosine
  modified_base 8: mod_base = um
  modified_base 9: mod_base = OTHER; note = 2'-fluorocytidine
  modified_base 10: mod_base = OTHER; note = 2'-fluoroadenosine
  modified_base 11: mod_base = OTHER; note = 2'-fluorouridine
  modified_base 12: mod_base = um
  modified_base 13: mod_base = cm
  modified_base 14: mod_base = OTHER; note = 2'-O-methyladenosine
  modified_base 15: mod_base = OTHER; note = 2'-O-methyladenosine
  modified_base 16: mod_base = OTHER; note = 2'-O-methyladenosine
  modified_base 17: mod_base = cm
  modified_base 18: mod_base = um
  modified_base 19: mod_base = OTHER; note = 2'-O-methyluridine with a 3'-phosphorothioate linkage
  modified_base 20: mod_base = OTHER; note = 2'-O-methyladenosine with a 3'-phosphorothioate linkage
  modified_base 21: mod_base = OTHER; note = 2'-O-methyladenosine
gaaagaatcattcaaacttaa

SEQ ID NO: 200 - RNA, 21 nt, synthetic construct
  source 1..21: mol_type = other RNA
  modified_base 1: mod_base = OTHER; note = 2'-O-methyluridine with a 3'-phosphorothioate linkage
  modified_base 2: mod_base = OTHER; note = 2'-O-methyluridine with a 3'-phosphorothioate linkage
  modified_base 3: mod_base = um
  modified_base 4: mod_base = OTHER; note = 2'-O-methyladenosine
  modified_base 5: mod_base = um
  modified_base 6: mod_base = um
  modified_base 7: mod_base = gm
  modified_base 8: mod_base = gm
  modified_base 9: mod_base = OTHER; note = 2'-fluoroadenosine
  modified_base 10: mod_base = OTHER; note = 2'-fluoroadenosine
  modified_base 11: mod_base = OTHER; note = 2'-fluoroadenosine
  modified_base 12: mod_base = um
  modified_base 13: mod_base = OTHER; note = 2'-O-methyladenosine
  modified_base 14: mod_base = um
  modified_base 15: mod_base = um
  modified_base 16: mod_base = um
  modified_base 17: mod_base = OTHER; note = 2'-O-methyladenosine
  modified_base 18: mod_base = OTHER; note = 2'-O-methyladenosine
  modified_base 19: mod_base = OTHER; note = 2'-O-methyladenosine with a 3'-phosphorothioate linkage
  modified_base 20: mod_base = OTHER; note = 2'-O-methyladenosine with a 3'-phosphorothioate linkage
  modified_base 21: mod_base = OTHER; note = 2'-O-methyladenosine
tttattggaaatatttaaaaa

SEQ ID NO: 201 - RNA, 21 nt, synthetic construct
  source 1..21: mol_type = other RNA
  modified_base 1: mod_base = OTHER; note = 2'-O-methyladenosine with a 3'-phosphorothioate linkage
  modified_base 2: mod_base = OTHER; note = 2'-O-methyladenosine with a 3'-phosphorothioate linkage
  modified_base 3: mod_base = OTHER; note = 2'-O-methyladenosine
  modified_base 4: mod_base = cm
  modified_base 5: mod_base = um
  modified_base 6: mod_base = cm
  modified_base 7: mod_base = cm
  modified_base 8: mod_base = OTHER; note = 2'-O-methyladenosine
  modified_base 9: mod_base = OTHER; note = 2'-fluoroadenosine
  modified_base 10: mod_base = OTHER; note = 2'-fluoroguanosine
  modified_base 11: mod_base = OTHER; note = 2'-fluoroadenosine
  modified_base 12: mod_base = OTHER; note = 2'-O-methyladenosine
  modified_base 13: mod_base = um
  modified_base 14: mod_base = cm
  modified_base 15: mod_base = um
  modified_base 16: mod_base = um
  modified_base 17: mod_base = um
  modified_base 18: mod_base = um
  modified_base 19: mod_base = OTHER; note = 2'-O-methyladenosine with a 3'-phosphorothioate linkage
  modified_base 20: mod_base = OTHER; note = 2'-O-methyluridine with a 3'-phosphorothioate linkage
  modified_base 21: mod_base = OTHER; note = 2'-O-methyladenosine
aaactccaagaatcttttata

SEQ ID NO: 202 - RNA, 21 nt, synthetic construct
  source 1..21: mol_type = other RNA
  modified_base 1: mod_base = OTHER; note = 2'-O-methylguanosine with a 3'-phosphorothioate linkage
  modified_base 2: mod_base = OTHER; note = 2'-O-methyladenosine with a 3'-phosphorothioate linkage
  modified_base 3: mod_base = OTHER; note = 2'-O-methyladenosine
  modified_base 4: mod_base = gm
  modified_base 5: mod_base = OTHER; note = 2'-O-methyladenosine
  modified_base 6: mod_base = OTHER; note = 2'-O-methyladenosine
  modified_base 7: mod_base = gm
  modified_base 8: mod_base = OTHER; note = 2'-O-methyladenosine
  modified_base 9: mod_base = OTHER; note = 2'-fluoroadenosine
  modified_base 10: mod_base = OTHER; note = 2'-fluoroadenosine
  modified_base 11: mod_base = OTHER; note = 2'-fluoroadenosine
  modified_base 12: mod_base = cm
  modified_base 13: mod_base = OTHER; note = 2'-O-methyladenosine
  modified_base 14: mod_base = um
  modified_base 15: mod_base = um
  modified_base 16: mod_base = um
  modified_base 17: mod_base = um
  modified_base 18: mod_base = cm
  modified_base 19: mod_base = OTHER; note = 2'-O-methyluridine with a 3'-phosphorothioate linkage
  modified_base 20: mod_base = OTHER; note = 2'-O-methylcytidine with a 3'-phosphorothioate linkage
  modified_base 21: mod_base = OTHER; note = 2'-O-methyladenosine
gaagaagaaaacattttctca

SEQ ID NO: 203 - RNA, 21 nt, synthetic construct
  source 1..21: mol_type = other RNA
  modified_base 1: mod_base = OTHER; note = 2'-O-methyladenosine with a 3'-phosphorothioate linkage
  modified_base 2: mod_base = OTHER; note = 2'-O-methylcytidine with a 3'-phosphorothioate linkage
  modified_base 3: mod_base = gm
  modified_base 4: mod_base = gm
  modified_base 5: mod_base = um
  modified_base 6: mod_base = gm
  modified_base 7: mod_base = OTHER; note = 2'-O-methyladenosine
  modified_base 8: mod_base = OTHER; note = 2'-O-methyladenosine
  modified_base 9: mod_base = OTHER; note = 2'-fluoroguanosine
  modified_base 10: mod_base = OTHER; note = 2'-fluoroadenosine
  modified_base 11: mod_base = OTHER; note = 2'-fluoroadenosine
  modified_base 12: mod_base = um
  modified_base 13: mod_base = um
  modified_base 14: mod_base = OTHER; note = 2'-O-methyladenosine
  modified_base 15: mod_base = gm
  modified_base 16: mod_base = OTHER; note = 2'-O-methyladenosine
  modified_base 17: mod_base = um
  modified_base 18: mod_base = OTHER; note = 2'-O-methyladenosine
  modified_base 19: mod_base = OTHER; note = 2'-O-methylcytidine with a 3'-phosphorothioate linkage
  modified_base 20: mod_base = OTHER; note = 2'-O-methyladenosine with a 3'-phosphorothioate linkage
  modified_base 21: mod_base = OTHER; note = 2'-O-methyladenosine
acggtgaagaattagatacaa

SEQ ID NO: 204 - RNA, 21 nt, synthetic construct
  source 1..21: mol_type = other RNA
  modified_base 1: mod_base = OTHER; note = 2'-O-methyladenosine with a 3'-phosphorothioate linkage
  modified_base 2: mod_base = OTHER; note = 2'-O-methylguanosine with a 3'-phosphorothioate linkage
  modified_base 3: mod_base = gm
  modified_base 4: mod_base = gm
  modified_base 5: mod_base = OTHER; note = 2'-O-methyladenosine
  modified_base 6: mod_base = cm
  modified_base 7: mod_base = um
  modified_base 8: mod_base = OTHER; note = 2'-O-methyladenosine
  modified_base 9: mod_base = OTHER; note = 2'-fluoroadenosine
  modified_base 10: mod_base = OTHER; note = 2'-fluoroadenosine
  modified_base 11: mod_base = OTHER; note = 2'-fluorouridine
  modified_base 12: mod_base = OTHER; note = 2'-O-methyladenosine
  modified_base 13: mod_base = gm
  modified_base 14: mod_base = gm
  modified_base 15: mod_base = OTHER; note = 2'-O-methyladenosine
  modified_base 16: mod_base = OTHER; note = 2'-O-methyladenosine
  modified_base 17: mod_base = um
  modified_base 18: mod_base = OTHER; note = 2'-O-methyladenosine
  modified_base 19: mod_base = OTHER; note = 2'-O-methylguanosine with a 3'-phosphorothioate linkage
  modified_base 20: mod_base = OTHER; note = 2'-O-methyluridine with a 3'-phosphorothioate linkage
  modified_base 21: mod_base = OTHER; note = 2'-O-methyladenosine
agggactaaataggaatagta

SEQ ID NO: 205 - RNA, 21 nt, synthetic construct
  source 1..21: mol_type = other RNA
  modified_base 1: mod_base = OTHER; note = 2'-O-methyladenosine with a 3'-phosphorothioate linkage
  modified_base 2: mod_base = OTHER; note = 2'-O-methylguanosine with a 3'-phosphorothioate linkage
  modified_base 3: mod_base = OTHER; note = 2'-O-methyladenosine
  modified_base 4: mod_base = OTHER; note = 2'-O-methyladenosine
  modified_base 5: mod_base = OTHER; note = 2'-O-methyladenosine
  modified_base 6: mod_base = um
  modified_base 7: mod_base = gm
  modified_base 8: mod_base = gm
  modified_base 9: mod_base = OTHER; note = 2'-fluoroadenosine
  modified_base 10: mod_base = OTHER; note = 2'-fluoroadenosine
  modified_base 11: mod_base = OTHER; note = 2'-fluoroadenosine
  modified_base 12: mod_base = OTHER; note = 2'-O-methyladenosine
  modified_base 13: mod_base = cm
  modified_base 14: mod_base = OTHER; note = 2'-O-methyladenosine
  modified_base 15: mod_base = OTHER; note = 2'-O-methyladenosine
  modified_base 16: mod_base = um
  modified_base 17: mod_base = cm
  modified_base 18: mod_base = um
  modified_base 19: mod_base = OTHER; note = 2'-O-methyladenosine with a 3'-phosphorothioate linkage
  modified_base 20: mod_base = OTHER; note = 2'-O-methyladenosine with a 3'-phosphorothioate linkage
  modified_base 21: mod_base = OTHER; note = 2'-O-methyladenosine
agaaatggaaaacaatctaaa

SEQ ID NO: 206 - RNA, 21 nt, synthetic construct
  source 1..21: mol_type = other RNA
  modified_base 1: mod_base = OTHER; note = 2'-O-methyladenosine with a 3'-phosphorothioate linkage
  modified_base 2: mod_base = OTHER; note = 2'-O-methyladenosine with a 3'-phosphorothioate linkage
  modified_base 3: mod_base = gm
  modified_base 4: mod_base = gm
  modified_base 5: mod_base = um
  modified_base 6: mod_base = cm
  modified_base 7: mod_base = OTHER; note = 2'-O-methyladenosine
  modified_base 8: mod_base = um
  modified_base 9: mod_base = OTHER; note = 2'-fluorocytidine
  modified_base 10: mod_base = OTHER; note = 2'-fluorouridine
  modified_base 11: mod_base = OTHER; note = 2'-fluorouridine
  modified_base 12: mod_base = cm
  modified_base 13: mod_base = um
  modified_base 14: mod_base = gm
  modified_base 15: mod_base = um
  modified_base 16: mod_base = OTHER; note = 2'-O-methyladenosine
  modified_base 17: mod_base = um
  modified_base 18: mod_base = cm
  modified_base 19: mod_base = OTHER; note = 2'-O-methyladenosine with a 3'-phosphorothioate linkage
  modified_base 20: mod_base = OTHER; note = 2'-O-methylcytidine with a 3'-phosphorothioate linkage
  modified_base 21: mod_base = OTHER; note = 2'-O-methyladenosine
aaggtcatcttctgtatcaca

SEQ ID NO: 207 - RNA, 21 nt, synthetic construct
  source 1..21: mol_type = other RNA
  modified_base 1: mod_base = OTHER; note = 2'-O-methylcytidine with a 3'-phosphorothioate linkage
  modified_base 2: mod_base = OTHER; note = 2'-O-methyladenosine with a 3'-phosphorothioate linkage
  modified_base 3: mod_base = gm
  modified_base 4: mod_base = um
  modified_base 5: mod_base = cm
  modified_base 6: mod_base = cm
  modified_base 7: mod_base = OTHER; note = 2'-O-methyladenosine
  modified_base 8: mod_base = um
  modified_base 9: mod_base = OTHER; note = 2'-fluorouridine
  modified_base 10: mod_base = OTHER; note = 2'-fluorocytidine
  modified_base 11: mod_base = OTHER; note = 2'-fluoroadenosine
  modified_base 12: mod_base = um
  modified_base 13: mod_base = gm
  modified_base 14: mod_base = gm
  modified_base 15: mod_base = OTHER; note = 2'-O-methyladenosine
  modified_base 16: mod_base = um
  modified_base 17: mod_base = cm
  modified_base 18: mod_base = gm
  modified_base 19: mod_base = OTHER; note = 2'-O-methyluridine with a 3'-phosphorothioate linkage
  modified_base 20: mod_base = OTHER; note = 2'-O-methyluridine with a 3'-phosphorothioate linkage
  modified_base 21: mod_base = OTHER; note = 2'-O-methyladenosine
cagtccattcatggatcgtta

SEQ ID NO: 208 - RNA, 21 nt, synthetic construct
  source 1..21: mol_type = other RNA
  modified_base 1: mod_base = OTHER; note = 2'-O-methyluridine with a 3'-phosphorothioate linkage
  modified_base 2: mod_base = OTHER; note = 2'-O-methyluridine with a 3'-phosphorothioate linkage
  modified_base 3: mod_base = um
  modified_base 4: mod_base = um
  modified_base 5: mod_base = cm
  modified_base 6: mod_base = cm
  modified_base 7: mod_base = OTHER; note = 2'-O-methyladenosine
  modified_base 8: mod_base = OTHER; note = 2'-O-methyladenosine
  modified_base 9: mod_base = OTHER; note = 2'-fluorouridine
  modified_base 10: mod_base = OTHER; note = 2'-fluorouridine
  modified_base 11: mod_base = OTHER; note = 2'-fluorouridine
  modified_base 12: mod_base = um
  modified_base 13: mod_base = um
  modified_base 14: mod_base = gm
  modified_base 15: mod_base = OTHER; note = 2'-O-methyladenosine
  modified_base 16: mod_base = OTHER; note = 2'-O-methyladenosine
  modified_base 17: mod_base = cm
  modified_base 18: mod_base = um
  modified_base 19: mod_base = OTHER; note = 2'-O-methyluridine with a 3'-phosphorothioate linkage
  modified_base 20: mod_base = OTHER; note = 2'-O-methylguanosine with a 3'-phosphorothioate linkage
  modified_base 21: mod_base = OTHER; note = 2'-O-methyladenosine
ttttccaatttttgaacttga

SEQ ID NO: 209 - RNA, 21 nt, synthetic construct
  source 1..21: mol_type = other RNA
  modified_base 1: mod_base = OTHER; note = 2'-O-methylcytidine with a 3'-phosphorothioate linkage
  modified_base 2: mod_base = OTHER; note = 2'-O-methyluridine with a 3'-phosphorothioate linkage
  modified_base 3: mod_base = cm
  modified_base 4: mod_base = OTHER; note = 2'-O-methyladenosine
  modified_base 5: mod_base = OTHER; note = 2'-O-methyladenosine
  modified_base 6: mod_base = cm
  modified_base 7: mod_base = OTHER; note = 2'-O-methyladenosine
  modified_base 8: mod_base = OTHER; note = 2'-O-methyladenosine
  modified_base 9: mod_base = OTHER; note = 2'-fluorouridine
  modified_base 10: mod_base = OTHER; note = 2'-fluorouridine
  modified_base 11: mod_base = OTHER; note = 2'-fluorouridine
  modified_base 12: mod_base = OTHER; note = 2'-O-methyladenosine
  modified_base 13: mod_base = um
  modified_base 14: mod_base = gm
  modified_base 15: mod_base = OTHER; note = 2'-O-methyladenosine
  modified_base 16: mod_base = OTHER; note = 2'-O-methyladenosine
  modified_base 17: mod_base = cm
  modified_base 18: mod_base = um
  modified_base 19: mod_base = OTHER; note = 2'-O-methyladenosine with a 3'-phosphorothioate linkage
  modified_base 20: mod_base = OTHER; note = 2'-O-methyluridine with a 3'-phosphorothioate linkage
  modified_base 21: mod_base = OTHER; note = 2'-O-methyladenosine
ctcaacaatttatgaactata

SEQ ID NO: 210 - RNA, 21 nt, synthetic construct
  source 1..21: mol_type = other RNA
  modified_base 1: mod_base = OTHER; note = 2'-O-methylcytidine with a 3'-phosphorothioate linkage
  modified_base 2: mod_base = OTHER; note = 2'-O-methylguanosine with a 3'-phosphorothioate linkage
  modified_base 3: mod_base = OTHER; note = 2'-O-methyladenosine
  modified_base 4: mod_base = OTHER; note = 2'-O-methyladenosine
  modified_base 5: mod_base = um
  modified_base 6: mod_base = um
  modified_base 7: mod_base = gm
  modified_base 8: mod_base = cm
  modified_base 9: mod_base = OTHER; note = 2'-fluorouridine
  modified_base 10: mod_base = OTHER; note = 2'-fluorouridine
  modified_base 11: mod_base = OTHER; note = 2'-fluoroadenosine
  modified_base 12: mod_base = um
  modified_base 13: mod_base = OTHER; note = 2'-O-methyladenosine
  modified_base 14: mod_base = um
  modified_base 15: mod_base = um
  modified_base 16: mod_base = um
  modified_base 17: mod_base = cm
  modified_base 18: mod_base = um
  modified_base 19: mod_base = OTHER; note = 2'-O-methyluridine with a 3'-phosphorothioate linkage
  modified_base 20: mod_base = OTHER; note = 2'-O-methylcytidine with a 3'-phosphorothioate linkage
  modified_base 21: mod_base = OTHER; note = 2'-O-methyladenosine
cgaattgcttatatttcttca

SEQ ID NO: 211 - RNA, 21 nt, synthetic construct
  source 1..21: mol_type = other RNA
  modified_base 1: mod_base = OTHER; note = 2'-O-methylguanosine with a 3'-phosphorothioate linkage
  modified_base 2: mod_base = OTHER; note = 2'-O-methyladenosine with a 3'-phosphorothioate linkage
  modified_base 3: mod_base = OTHER; note = 2'-O-methyladenosine
  modified_base 4: mod_base = um
  modified_base 5: mod_base = um
  modified_base 6: mod_base = gm
  modified_base 7: mod_base = cm
  modified_base 8: mod_base = um
  modified_base 9: mod_base = OTHER; note = 2'-fluorouridine
  modified_base 10: mod_base = OTHER; note = 2'-fluoroadenosine
  modified_base 11: mod_base = OTHER; note = 2'-fluorouridine
  modified_base 12: mod_base = OTHER; note = 2'-O-methyladenosine
  modified_base 13: mod_base = um
  modified_base 14: mod_base = um
  modified_base 15: mod_base = um
  modified_base 16: mod_base = cm
  modified_base 17: mod_base = um
  modified_base 18: mod_base = um
  modified_base 19: mod_base = OTHER; note = 2'-O-methylcytidine with a 3'-phosphorothioate linkage
  modified_base 20: mod_base = OTHER; note = 2'-O-methylguanosine with a 3'-phosphorothioate linkage
  modified_base 21: mod_base = OTHER; note = 2'-O-methyladenosine
gaattgcttatatttcttcga

SEQ ID NO: 212 - RNA, 21 nt, synthetic construct
  source 1..21: mol_type = other RNA
  modified_base 1: mod_base = OTHER; note = 2'-O-methylcytidine with a 3'-phosphorothioate linkage
  modified_base 2: mod_base = OTHER; note = 2'-O-methyladenosine with a 3'-phosphorothioate linkage
  modified_base 3: mod_base = OTHER; note = 2'-O-methyladenosine
  modified_base 4: mod_base = um
  modified_base 5: mod_base = um
  modified_base 6: mod_base = um
  modified_base 7: mod_base = um
  modified_base 8: mod_base = um
  modified_base 9: mod_base = OTHER; note = 2'-fluoroguanosine
  modified_base 10: mod_base = OTHER; note = 2'-fluoroadenosine
  modified_base 11: mod_base = OTHER; note = 2'-fluoroadenosine
  modified_base 12: mod_base = cm
  modified_base 13: mod_base = um
  modified_base 14: mod_base = um
  modified_base 15: mod_base = gm
  modified_base 16: mod_base = um
  modified_base 17: mod_base = OTHER; note = 2'-O-methyladenosine
  modified_base 18: mod_base = gm
  modified_base 19: mod_base = OTHER; note = 2'-O-methyladenosine with a 3'-phosphorothioate linkage
  modified_base 20: mod_base = OTHER; note = 2'-O-methyladenosine with a 3'-phosphorothioate linkage
  modified_base 21: mod_base = OTHER; note = 2'-O-methyladenosine
caatttttgaacttgtagaaa

SEQ ID NO: 213 - RNA, 21 nt, synthetic construct
  source 1..21: mol_type = other RNA
  modified_base 1: mod_base = OTHER; note = 2'-O-methyladenosine with a 3'-phosphorothioate linkage
  modified_base 2: mod_base = OTHER; note = 2'-O-methylguanosine with a 3'-phosphorothioate linkage
  modified_base 3: mod_base = gm
  modified_base 4: mod_base = OTHER; note = 2'-O-methyladenosine
  modified_base 5: mod_base = OTHER; note = 2'-O-methyladenosine
  modified_base 6: mod_base = gm
  modified_base 7: mod_base = OTHER; note = 2'-O-methyladenosine
  modified_base 8: mod_base = OTHER; note = 2'-O-methyladenosine
  modified_base 9: mod_base = OTHER; note = 2'-fluoroguanosine
  modified_base 10: mod_base = OTHER; note = 2'-fluoroadenosine
  modified_base 11: mod_base = OTHER; note = 2'-fluoroadenosine
  modified_base 12: mod_base = OTHER; note = 2'-O-methyladenosine
  modified_base 13: mod_base = OTHER; note = 2'-O-methyladenosine
  modified_base 14: mod_base = OTHER; note = 2'-O-methyladenosine
  modified_base 15: mod_base = um
  modified_base 16: mod_base = gm
  modified_base 17: mod_base = um
  modified_base 18: mod_base = OTHER; note = 2'-O-methyladenosine
  modified_base 19: mod_base = OTHER; note = 2'-O-methyladenosine with a 3'-phosphorothioate linkage
  modified_base 20: mod_base = OTHER; note = 2'-O-methyladenosine with a 3'-phosphorothioate linkage
  modified_base 21: mod_base = OTHER; note = 2'-O-methyladenosine
aggaagaagaaaaatgtaaaa

SEQ ID NO: 214 - RNA, 21 nt, synthetic construct
  source 1..21: mol_type = other RNA
  modified_base 1: mod_base = OTHER; note = 2'-O-methyluridine with a 3'-phosphorothioate linkage
  modified_base 2: mod_base = OTHER; note = 2'-O-methylguanosine with a 3'-phosphorothioate linkage
  modified_base 3: mod_base = gm
  modified_base 4: mod_base = um
  modified_base 5: mod_base = OTHER; note = 2'-O-methyladenosine
  modified_base 6: mod_base = um
  modified_base 7: mod_base = OTHER; note = 2'-O-methyladenosine
  modified_base 8: mod_base = OTHER; note = 2'-O-methyladenosine
  modified_base 9: mod_base = OTHER; note = 2'-fluoroguanosine
  modified_base 10: mod_base = OTHER; note = 2'-fluorocytidine
  modified_base 11: mod_base = OTHER; note = 2'-fluorocytidine
  modified_base 12: mod_base = um
  modified_base 13: mod_base = cm
  modified_base 14: mod_base = OTHER; note = 2'-O-methyladenosine
  modified_base 15: mod_base = um
  modified_base 16: mod_base = um
  modified_base 17: mod_base = OTHER; note = 2'-O-methyladenosine
  modified_base 18: mod_base = um
  modified_base 19: mod_base = OTHER; note = 2'-O-methylcytidine with a 3'-phosphorothioate linkage
  modified_base 20: mod_base = OTHER; note = 2'-O-methyladenosine with a 3'-phosphorothioate linkage
  modified_base 21: mod_base = OTHER; note = 2'-O-methyladenosine
tggtataagcctcattatcaa

SEQ ID NO: 215 - RNA, 21 nt, synthetic construct
  source 1..21: mol_type = other RNA
  modified_base 1: mod_base = OTHER; note = 2'-O-methyluridine with a 3'-phosphorothioate linkage
  modified_base 2: mod_base = OTHER; note = 2'-O-methylguanosine with a 3'-phosphorothioate linkage
  modified_base 3: mod_base = gm
  modified_base 4: mod_base = cm
  modified_base 5: mod_base = um
  modified_base 6: mod_base = OTHER; note = 2'-O-hexadecyl cytidine
  modified_base 7: mod_base = um
  modified_base 8: mod_base = cm
  modified_base 9: mod_base = OTHER; note = 2'-fluorouridine
  modified_base 10: mod_base = OTHER; note = 2'-fluoroadenosine
  modified_base 11: mod_base = OTHER; note = 2'-fluoroadenosine
  modified_base 12: mod_base = cm
  modified_base 13: mod_base = um
  modified_base 14: mod_base = OTHER; note = 2'-O-methyladenosine
  modified_base 15: mod_base = OTHER; note = 2'-O-methyladenosine
  modified_base 16: mod_base = um
  modified_base 17: mod_base = cm
  modified_base 18: mod_base = gm
  modified_base 19: mod_base = OTHER; note = 2'-O-methyladenosine with a 3'-phosphorothioate linkage
  modified_base 20: mod_base = OTHER; note = 2'-O-methyluridine with a 3'-phosphorothioate linkage
  modified_base 21: mod_base = OTHER; note = 2'-O-methyladenosine
tggctctctaactaatcgata

SEQ ID NO: 216 - RNA, 21 nt, synthetic construct
  source 1..21: mol_type = other RNA
  modified_base 1: mod_base = OTHER; note = 2'-O-methylguanosine with a 3'-phosphorothioate linkage
  modified_base 2: mod_base = OTHER; note = 2'-O-methyladenosine with a 3'-phosphorothioate linkage
  modified_base 3: mod_base = OTHER; note = 2'-O-methyladenosine
  modified_base 4: mod_base = gm
  modified_base 5: mod_base = OTHER; note = 2'-O-methyladenosine
  modified_base 6: mod_base = OTHER; note = 2'-O-hexadecyl adenosine
  modified_base 7: mod_base = gm
  modified_base 8: mod_base = OTHER; note = 2'-O-methyladenosine
  modified_base 9: mod_base = OTHER; note = 2'-fluoroadenosine
  modified_base 10: mod_base = OTHER; note = 2'-fluoroadenosine
  modified_base 11: mod_base = OTHER; note = 2'-fluoroadenosine
  modified_base 12: mod_base = OTHER; note = 2'-O-methyladenosine
  modified_base 13: mod_base = um
  modified_base 14: mod_base = gm
  modified_base 15: mod_base = um
  modified_base 16: mod_base = OTHER; note = 2'-O-methyladenosine
  modified_base 17: mod_base = OTHER; note = 2'-O-methyladenosine
  modified_base 18: mod_base = OTHER; note = 2'-O-methyladenosine
  modified_base 19: mod_base = OTHER; note = 2'-O-methylguanosine with a 3'-phosphorothioate linkage
  modified_base 20: mod_base = OTHER; note = 2'-O-methylcytidine with a 3'-phosphorothioate linkage
  modified_base 21: mod_base = OTHER; note = 2'-O-methyladenosine
gaagaagaaaaatgtaaagca

SEQ ID NO: 217 - RNA, 21 nt, synthetic construct
  source 1..21: mol_type = other RNA
  modified_base 1: mod_base = OTHER; note = 2'-O-methyladenosine with a 3'-phosphorothioate linkage
  modified_base 2: mod_base = OTHER; note = 2'-O-methyladenosine with a 3'-phosphorothioate linkage
  modified_base 3: mod_base = cm
  modified_base 4: mod_base = um
  modified_base 5: mod_base = um
  modified_base 6: mod_base = OTHER; note = 2'-O-hexadecyl guanosine
  modified_base 7: mod_base = um
  modified_base 8: mod_base = OTHER; note = 2'-O-methyladenosine
  modified_base 9: mod_base = OTHER; note = 2'-fluoroguanosine
  modified_base 10: mod_base = OTHER; note = 2'-fluoroadenosine
  modified_base 11: mod_base = OTHER; note = 2'-fluoroadenosine
  modified_base 12: mod_base = OTHER; note = 2'-O-methyladenosine
  modified_base 13: mod_base = OTHER; note = 2'-O-methyladenosine
  modified_base 14: mod_base = gm
  modified_base 15: mod_base = OTHER; note = 2'-O-methyladenosine
  modified_base 16: mod_base = um
  modified_base 17: mod_base = gm
  modified_base 18: mod_base = gm
  modified_base 19: mod_base = OTHER; note = 2'-O-methylguanosine with a 3'-phosphorothioate linkage
  modified_base 20: mod_base = OTHER; note = 2'-O-methyladenosine with a 3'-phosphorothioate linkage
  modified_base 21: mod_base = OTHER; note = 2'-O-methyladenosine
aacttgtagaaaagatgggaa

SEQ ID NO: 218 - RNA, 21 nt, synthetic construct
  source 1..21: mol_type = other RNA
  modified_base 1: mod_base = OTHER; note = 2'-O-methylcytidine with a 3'-phosphorothioate linkage
  modified_base 2: mod_base = OTHER; note = 2'-O-methyluridine with a 3'-phosphorothioate linkage
  modified_base 3: mod_base = gm
  modified_base 4: mod_base = cm
  modified_base 5: mod_base = OTHER; note = 2'-O-methyladenosine
  modified_base 6: mod_base = OTHER; note = 2'-O-hexadecyl uridine
  modified_base 7: mod_base = um
  modified_base 8: mod_base = OTHER; note = 2'-O-methyladenosine
  modified_base 9: mod_base = OTHER; note = 2'-fluoroguanosine
  modified_base 10: mod_base = OTHER; note = 2'-fluoroadenosine
  modified_base 11: mod_base = OTHER; note = 2'-fluoroadenosine
  modified_base 12: mod_base = um
  modified_base 13: mod_base = um
  modified_base 14: mod_base = gm
  modified_base 15: mod_base = OTHER; note = 2'-O-methyladenosine
  modified_base 16: mod_base = um
  modified_base 17: mod_base = gm
  modified_base 18: mod_base = gm
  modified_base 19: mod_base = OTHER; note = 2'-O-methylcytidine with a 3'-phosphorothioate linkage
  modified_base 20: mod_base = OTHER; note = 2'-O-methyluridine with a 3'-phosphorothioate linkage
  modified_base 21: mod_base = OTHER; note = 2'-O-methyladenosine
ctgcattagaattgatggcta

SEQ ID NO: 219 - RNA, 21 nt, synthetic construct
  source 1..21: mol_type = other RNA
  modified_base 1: mod_base = OTHER; note = 2'-O-methylcytidine with a 3'-phosphorothioate linkage
  modified_base 2: mod_base = OTHER; note = 2'-O-methyluridine with a 3'-phosphorothioate linkage
  modified_base 3: mod_base = cm
  modified_base 4: mod_base = um
  modified_base 5: mod_base = cm
  modified_base 6: mod_base = OTHER; note = 2'-O-hexadecyl uridine
  modified_base 7: mod_base = OTHER; note = 2'-O-methyladenosine
  modified_base 8: mod_base = OTHER; note = 2'-O-methyladenosine
  modified_base 9: mod_base = OTHER; note = 2'-fluorocytidine
  modified_base 10: mod_base = OTHER; note = 2'-fluorouridine
  modified_base 11: mod_base = OTHER; note = 2'-fluoroadenosine
  modified_base 12: mod_base = OTHER; note = 2'-O-methyladenosine
  modified_base 13: mod_base = um
  modified_base 14: mod_base = cm
  modified_base 15: mod_base = gm
  modified_base 16: mod_base = OTHER; note = 2'-O-methyladenosine
  modified_base 17: mod_base = um
  modified_base 18: mod_base = cm
  modified_base 19: mod_base = OTHER; note = 2'-O-methyladenosine with a 3'-phosphorothioate linkage
  modified_base 20: mod_base = OTHER; note = 2'-O-methylcytidine with a 3'-phosphorothioate linkage
  modified_base 21: mod_base = OTHER; note = 2'-O-methyladenosine
ctctctaactaatcgatcaca

SEQ ID NO: 220 - RNA, 21 nt, synthetic construct
  source 1..21: mol_type = other RNA
  modified_base 1: mod_base = OTHER; note = 2'-O-methyladenosine with a 3'-phosphorothioate linkage
  modified_base 2: mod_base = OTHER; note = 2'-O-methylcytidine with a 3'-phosphorothioate linkage
  modified_base 3: mod_base = um
  modified_base 4: mod_base = gm
  modified_base 5: mod_base = gm
  modified_base 6: mod_base = OTHER; note = 2'-O-hexadecyl cytidine
  modified_base 7: mod_base = um
  modified_base 8: mod_base = cm
  modified_base 9: mod_base = OTHER; note = 2'-fluorouridine
  modified_base 10: mod_base = OTHER; note = 2'-fluorocytidine
  modified_base 11: mod_base = OTHER; note = 2'-fluorouridine
  modified_base 12: mod_base = OTHER; note = 2'-O-methyladenosine
  modified_base 13: mod_base = OTHER; note = 2'-O-methyladenosine
  modified_base 14: mod_base = cm
  modified_base 15: mod_base = um
  modified_base 16: mod_base = OTHER; note = 2'-O-methyladenosine
  modified_base 17: mod_base = OTHER; note = 2'-O-methyladenosine
  modified_base 18: mod_base = um
  modified_base 19: mod_base = OTHER; note = 2'-O-methylcytidine with a 3'-phosphorothioate linkage
  modified_base 20: mod_base = OTHER; note = 2'-O-methylguanosine with a 3'-phosphorothioate linkage
  modified_base 21: mod_base = OTHER; note = 2'-O-methyladenosine
actggctctctaactaatcga

SEQ ID NO: 221 - RNA, 21 nt, synthetic construct
  source 1..21: mol_type = other RNA
  modified_base 1: mod_base = OTHER; note = 2'-O-methyluridine with a 3'-phosphorothioate linkage
  modified_base 2: mod_base = OTHER; note = 2'-O-methylcytidine with a 3'-phosphorothioate linkage
  modified_base 3: mod_base = um
  modified_base 4: mod_base = OTHER; note = 2'-O-methyladenosine
  modified_base 5: mod_base = OTHER; note = 2'-O-methyladenosine
  modified_base 6: mod_base = OTHER; note = 2'-O-hexadecyl cytidine
  modified_base 7: mod_base = um
  modified_base 8: mod_base = OTHER; note = 2'-O-methyladenosine
  modified_base 9: mod_base = OTHER; note = 2'-fluoroadenosine
  modified_base 10: mod_base = OTHER; note = 2'-fluorouridine
  modified_base 11: mod_base = OTHER; note = 2'-fluorocytidine
  modified_base 12: mod_base = gm
  modified_base 13: mod_base = OTHER; note = 2'-O-methyladenosine
  modified_base 14: mod_base = um
  modified_base 15: mod_base = cm
  modified_base 16: mod_base = OTHER; note = 2'-O-methyladenosine
  modified_base 17: mod_base = cm
  modified_base 18: mod_base = cm
  modified_base 19: mod_base = OTHER; note = 2'-O-methylcytidine with a 3'-phosphorothioate linkage
  modified_base 20: mod_base = OTHER; note = 2'-O-methyladenosine with a 3'-phosphorothioate linkage
  modified_base 21: mod_base = OTHER; note = 2'-O-methyladenosine
tctaactaatcgatcacccaa

SEQ ID NO: 222 - RNA, 21 nt, synthetic construct
  source 1..21: mol_type = other RNA
  modified_base 1: mod_base = OTHER; note = 2'-O-methylcytidine with a 3'-phosphorothioate linkage
  modified_base 2: mod_base = OTHER; note = 2'-O-methyluridine with a 3'-phosphorothioate linkage
  modified_base 3: mod_base = OTHER; note = 2'-O-methyladenosine
  modified_base 4: mod_base = OTHER; note = 2'-O-methyladenosine
  modified_base 5: mod_base = cm
  modified_base 6: mod_base = OTHER; note = 2'-O-hexadecyl uridine
  modified_base 7: mod_base = OTHER; note = 2'-O-methyladenosine
  modified_base 8: mod_base = OTHER; note = 2'-O-methyladenosine
  modified_base 9: mod_base = OTHER; note = 2'-fluorouridine
  modified_base 10: mod_base = OTHER; note = 2'-fluorocytidine
  modified_base 11: mod_base = OTHER; note = 2'-fluoroguanosine
  modified_base 12: mod_base = OTHER; note = 2'-O-methyladenosine
  modified_base 13: mod_base = um
  modified_base 14: mod_base = cm
  modified_base 15: mod_base = OTHER; note = 2'-O-methyladenosine
  modified_base 16: mod_base = cm
  modified_base 17: mod_base = cm
  modified_base 18: mod_base = cm
  modified_base 19: mod_base = OTHER; note = 2'-O-methyladenosine with a 3'-phosphorothioate linkage
  modified_base 20: mod_base = OTHER; note = 2'-O-methyluridine with a 3'-phosphorothioate linkage
  modified_base 21: mod_base = OTHER; note = 2'-O-methyladenosine
ctaactaatcgatcacccata

SEQ ID NO: 223 - RNA, 21 nt, synthetic construct
  source 1..21: mol_type = other RNA
  modified_base 1: mod_base = OTHER; note = 2'-O-methylcytidine with a 3'-phosphorothioate linkage
  modified_base 2: mod_base = OTHER; note = 2'-O-methylcytidine with a 3'-phosphorothioate linkage
  modified_base 3: mod_base = um
  modified_base 4: mod_base = gm
  modified_base 5: mod_base = cm
  modified_base 6: mod_base = OTHER; note = 2'-O-hexadecyl adenosine
  modified_base 7: mod_base = um
  modified_base 8: mod_base = um
  modified_base 9: mod_base = OTHER; note = 2'-fluoroadenosine
  modified_base 10: mod_base = OTHER; note = 2'-fluoroguanosine
  modified_base 11: mod_base = OTHER; note = 2'-fluoroadenosine
  modified_base 12: mod_base = OTHER; note = 2'-O-methyladenosine
  modified_base 13: mod_base = um
  modified_base 14: mod_base = um
  modified_base 15: mod_base = gm
  modified_base 16: mod_base = OTHER; note = 2'-O-methyladenosine
  modified_base 17: mod_base = um
  modified_base 18: mod_base = gm
  modified_base 19: mod_base = OTHER; note = 2'-O-methylguanosine with a 3'-phosphorothioate linkage
  modified_base 20: mod_base = OTHER; note = 2'-O-methylcytidine with a 3'-phosphorothioate linkage
  modified_base 21: mod_base = OTHER; note = 2'-O-methyladenosine
cctgcattagaattgatggca

SEQ ID NO: 224 - RNA, 23 nt, synthetic construct
  source 1..23: mol_type = other RNA
  modified_base 1: mod_base = OTHER; note = 2'-O-methyluridine with a 3'-phosphorothioate linkage
  modified_base 2: mod_base = OTHER; note = 2'-fluorouridine with a 3'-phosphorothioate linkage
  modified_base 3: mod_base = cm
  modified_base 4: mod_base = cm
  modified_base 5: mod_base = OTHER; note = 2'-fluorocytidine
  modified_base 6: mod_base = OTHER; note = 2'-O-methyladenosine
  modified_base 7: mod_base = OTHER; note = 2'-fluorouridine
  modified_base 8: mod_base = cm
  modified_base 9: mod_base = um
  modified_base 10: mod_base = um
  modified_base 11: mod_base = um
  modified_base 12: mod_base = um
  modified_base 13: mod_base = cm
  modified_base 14: mod_base = OTHER; note = 2'-fluorouridine
  modified_base 15: mod_base = OTHER; note = 2'-O-methyladenosine
  modified_base 16: mod_base = OTHER; note = 2'-fluorocytidine
  modified_base 17: mod_base = OTHER; note = 2'-O-methyladenosine
  modified_base 18: mod_base = OTHER; note = 2'-O-methyladenosine
  modified_base 19: mod_base = gm
  modified_base 20: mod_base = um
  modified_base 21: mod_base = OTHER; note = 2'-O-methyluridine with a 3'-phosphorothioate linkage
  modified_base 22: mod_base = OTHER; note = 2'-O-methylcytidine with a 3'-phosphorothioate linkage
  modified_base 23: mod_base = OTHER; note = 2'-O-methyladenosine
ttcccatcttttctacaagttca

SEQ ID NO: 225 - RNA, 23 nt, synthetic construct
  source 1..23: mol_type = other RNA
  modified_base 1: mod_base = OTHER; note = 2'-O-methyluridine with a 3'-phosphorothioate linkage
  modified_base 2: mod_base = OTHER; note = 2'-fluorouridine with a 3'-phosphorothioate linkage
  modified_base 3: mod_base = um
  modified_base 4: mod_base = cm
  modified_base 5: mod_base = OTHER; note = 2'-fluorocytidine
  modified_base 6: mod_base = um
  modified_base 7: mod_base = OTHER; note = 2'-fluorouridine
  modified_base 8: mod_base = cm
  modified_base 9: mod_base = cm
  modified_base 10: mod_base = OTHER; note = 2'-O-methyladenosine
  modified_base 11: mod_base = um
  modified_base 12: mod_base = OTHER; note = 2'-O-methyladenosine
  modified_base 13: mod_base = um
  modified_base 14: mod_base = OTHER; note = 2'-fluorocytidine
  modified_base 15: mod_base = um
  modified_base 16: mod_base = OTHER; note = 2'-fluorouridine
  modified_base 17: mod_base = gm
  modified_base 18: mod_base = um
  modified_base 19: mod_base = gm
  modified_base 20: mod_base = gm
  modified_base 21: mod_base = OTHER; note = 2'-O-methyluridine with a 3'-phosphorothioate linkage
  modified_base 22: mod_base = OTHER; note = 2'-O-methyluridine with a 3'-phosphorothioate linkage
  modified_base 23: mod_base = um
tttccttccatatcttgtggttt

SEQ ID NO: 226 - RNA, 23 nt, synthetic construct
  source 1..23: mol_type = other RNA
  modified_base 1: mod_base = OTHER; note = 2'-O-methyluridine with a 3'-phosphorothioate linkage
  modified_base 2: mod_base = OTHER; note = 2'-fluoroadenosine with a 3'-phosphorothioate linkage
  modified_base 3: mod_base = um
  modified_base 4: mod_base = um
  modified_base 5: mod_base = OTHER; note = 2'-fluorocytidine
  modified_base 6: mod_base = um
  modified_base 7: mod_base = OTHER; note = 2'-fluorouridine
  modified_base 8: mod_base = gm
  modified_base 9: mod_base = gm
  modified_base 10: mod_base = OTHER; note = 2'-O-methyladenosine
  modified_base 11: mod_base = gm
  modified_base 12: mod_base = um
  modified_base 13: mod_base = um
  modified_base 14: mod_base = OTHER; note = 2'-fluorouridine
  modified_base 15: mod_base = um
  modified_base 16: mod_base = OTHER; note = 2'-fluoroguanosine
  modified_base 17: mod_base = cm
  modified_base 18: mod_base = um
  modified_base 19: mod_base = OTHER; note = 2'-O-methyladenosine
  modified_base 20: mod_base = gm
  modified_base 21: mod_base = OTHER; note = 2'-O-methyluridine with a 3'-phosphorothioate linkage
  modified_base 22: mod_base = OTHER; note = 2'-O-methyluridine with a 3'-phosphorothioate linkage
  modified_base 23: mod_base = gm
tattcttggagttttgctagttg

SEQ ID NO: 227 - RNA, 23 nt, synthetic construct
  source 1..23: mol_type = other RNA
  modified_base 1: mod_base = OTHER; note = 2'-O-methyluridine with a 3'-phosphorothioate linkage
  modified_base 2: mod_base = OTHER; note = 2'-fluorocytidine with a 3'-phosphorothioate linkage
  modified_base 3: mod_base = gm
  modified_base 4: mod_base = OTHER; note = 2'-O-methyladenosine
  modified_base 5: mod_base = OTHER; note = 2'-fluorouridine
  modified_base 6: mod_base = um
  modified_base 7: mod_base = OTHER; note = 2'-fluoroadenosine
  modified_base 8: mod_base = gm
  modified_base 9: mod_base = um
  modified_base 10: mod_base = um
  modified_base 11: mod_base = OTHER; note = 2'-O-methyladenosine
  modified_base 12: mod_base = gm
  modified_base 13: mod_base = OTHER; note = 2'-O-methyladenosine
  modified_base 14: mod_base = OTHER; note = 2'-fluoroguanosine
  modified_base 15: mod_base = OTHER; note = 2'-O-methyladenosine
  modified_base 16: mod_base = OTHER; note = 2'-fluoroguanosine
  modified_base 17: mod_base = cm
  modified_base 18: mod_base = cm
  modified_base 19: mod_base = OTHER; note = 2'-O-methyladenosine
  modified_base 20: mod_base = gm
  modified_base 21: mod_base = OTHER; note = 2'-O-methyluridine with a 3'-phosphorothioate linkage
  modified_base 22: mod_base = OTHER; note = 2'-O-methyladenosine with a 3'-phosphorothioate linkage
  modified_base 23: mod_base = gm
tcgattagttagagagccagtag

SEQ ID NO: 228 - RNA, 23 nt, synthetic construct
  source 1..23: mol_type = other RNA
  modified_base 1: mod_base = OTHER; note = 2'-O-methyluridine with a 3'-phosphorothioate linkage
  modified_base 2: mod_base = OTHER; note = 2'-fluoroadenosine with a 3'-phosphorothioate linkage
  modified_base 3: mod_base = OTHER; note = 2'-O-methyladenosine
  modified_base 4: mod_base = OTHER; note = 2'-O-methyladenosine
  modified_base 5: mod_base = OTHER; note = 2'-fluoroadenosine
  modified_base 6: mod_base = gm
  modified_base 7: mod_base = OTHER; note = 2'-fluoroadenosine
  modified_base 8: mod_base = um
  modified_base 9: mod_base = um
  modified_base 10: mod_base = cm
  modified_base 11: mod_base = um
  modified_base 12: mod_base = um
  modified_base 13: mod_base = gm
  modified_base 14: mod_base = OTHER; note = 2'-fluoroguanosine
  modified_base 15: mod_base = OTHER; note = 2'-O-methyladenosine
  modified_base 16: mod_base = OTHER; note = 2'-fluoroguanosine
  modified_base 17: mod_base = um
  modified_base 18: mod_base = um
  modified_base 19: mod_base = um
  modified_base 20: mod_base = um
  modified_base 21: mod_base = OTHER; note = 2'-O-methylguanosine with a 3'-phosphorothioate linkage
  modified_base 22: mod_base = OTHER; note = 2'-O-methylcytidine with a 3'-phosphorothioate linkage
  modified_base 23: mod_base = um
taaaagattcttggagttttgct

SEQ ID NO: 229 - RNA, 23 nt, synthetic construct
  source 1..23: mol_type = other RNA
  modified_base 1: mod_base = OTHER; note = 2'-O-methyluridine with a 3'-phosphorothioate linkage
  modified_base 2: mod_base = OTHER; note = 2'-fluorocytidine with a 3'-phosphorothioate linkage
  modified_base 3: mod_base = OTHER; note = 2'-O-methyladenosine
  modified_base 4: mod_base = gm
  modified_base 5: mod_base = OTHER; note = 2'-fluorocytidine
  modified_base 6: mod_base = um
  modified_base 7: mod_base = OTHER; note = 2'-fluoroguanosine
  modified_base 8: mod_base = gm
  modified_base 9: mod_base = OTHER; note = 2'-O-methyladenosine
  modified_base 10: mod_base = cm
  modified_base 11: mod_base = cm
  modified_base 12: mod_base = um
  modified_base 13: mod_base = cm
  modified_base 14: mod_base = OTHER; note = 2'-fluorocytidine
  modified_base 15: mod_base = um
  modified_base 16: mod_base = OTHER; note = 2'-fluorocytidine
  modified_base 17: mod_base = cm
  modified_base 18: mod_base = gm
  modified_base 19: mod_base = gm
  modified_base 20: mod_base = gm
  modified_base 21: mod_base = OTHER; note = 2'-O-methylguanosine with a 3'-phosphorothioate linkage
  modified_base 22: mod_base = OTHER; note = 2'-O-methyluridine with a 3'-phosphorothioate linkage
  modified_base 23: mod_base = cm
tcagctggacctcctccggggtc

SEQ ID NO: 230 - RNA, 23 nt, synthetic construct
  source 1..23: mol_type = other RNA
  modified_base 1: mod_base = OTHER; note = 2'-O-methyluridine with a 3'-phosphorothioate linkage
  modified_base 2: mod_base = OTHER; note = 2'-fluoroguanosine with a 3'-phosphorothioate linkage
  modified_base 3: mod_base = cm
  modified_base 4: mod_base = cm
  modified_base 5: mod_base = OTHER; note = 2'-fluoroadenosine
  modified_base 6: mod_base = um
  modified_base 7: mod_base = OTHER; note = 2'-fluorocytidine
  modified_base 8: mod_base = OTHER; note = 2'-O-methyladenosine
  modified_base 9: mod_base = OTHER; note = 2'-O-methyladenosine
  modified_base 10: mod_base = um
  modified_base 11: mod_base = um
  modified_base 12: mod_base = cm
  modified_base 13: mod_base = um
  modified_base 14: mod_base = OTHER; note = 2'-fluoroadenosine
  modified_base 15: mod_base = OTHER; note = 2'-O-methyladenosine
  modified_base 16: mod_base = OTHER; note = 2'-fluorouridine
  modified_base 17: mod_base = gm
  modified_base 18: mod_base = cm
  modified_base 19: mod_base = OTHER; note = 2'-O-methyladenosine
  modified_base 20: mod_base = gm
  modified_base 21: mod_base = OTHER; note = 2'-O-methylguanosine with a 3'-phosphorothioate linkage
  modified_base 22: mod_base = OTHER; note = 2'-O-methyladenosine with a 3'-phosphorothioate linkage
  modified_base 23: mod_base = OTHER; note = 2'-O-methyladenosine
tgccatcaattctaatgcaggaa

SEQ ID NO: 231 - RNA, 23 nt, synthetic construct
  source 1..23: mol_type = other RNA
  modified_base 1: mod_base = OTHER; note = 2'-O-methyluridine with a 3'-phosphorothioate linkage
  modified_base 2: mod_base = OTHER; note = 2'-fluoroadenosine with a 3'-phosphorothioate linkage
  modified_base 3: mod_base = um
  modified_base 4: mod_base = gm
  modified_base 5: mod_base = OTHER; note = 2'-fluoroguanosine
  modified_base 6: mod_base = gm
  modified_base 7: mod_base = OTHER; note = 2'-fluorouridine
  modified_base 8: mod_base = gm
  modified_base 9: mod_base = OTHER; note = 2'-O-methyladenosine
  modified_base 10: mod_base = um
  modified_base 11: mod_base = cm
  modified_base 12: mod_base = gm
  modified_base 13: mod_base = OTHER; note = 2'-O-methyladenosine
  modified_base 14: mod_base = OTHER; note = 2'-fluorouridine
  modified_base 15: mod_base = um
  modified_base 16: mod_base = OTHER; note = 2'-fluoroadenosine
  modified_base 17: mod_base = gm
  modified_base 18: mod_base = um
  modified_base 19: mod_base = um
  modified_base 20: mod_base = OTHER; note = 2'-O-methyladenosine
  modified_base 21: mod_base = OTHER; note = 2'-O-methylguanosine with a 3'-phosphorothioate linkage
  modified_base 22: mod_base = OTHER; note = 2'-O-methyladenosine with a 3'-phosphorothioate linkage
  modified_base 23: mod_base = gm
tatgggtgatcgattagttagag

SEQ ID NO: 232 - RNA, 23 nt, synthetic construct
  source 1..23: mol_type = other RNA
  modified_base 1: mod_base = OTHER; note = 2'-O-methyluridine with a 3'-phosphorothioate linkage
  modified_base 2: mod_base = OTHER; note = 2'-fluorouridine with a 3'-phosphorothioate linkage
  modified_base 3: mod_base = um
  modified_base 4: mod_base = gm
  modified_base 5: mod_base = OTHER; note = 2'-fluoroguanosine
  modified_base 6: mod_base = OTHER; note = 2'-O-methyladenosine
  modified_base 7: mod_base = OTHER; note = 2'-fluoroguanosine
  modified_base 8: mod_base = um
  modified_base 9: mod_base = um
  modified_base 10: mod_base = um
  modified_base 11: mod_base = um
  modified_base 12: mod_base = gm
  modified_base 13: mod_base = cm
  modified_base 14: mod_base = OTHER; note = 2'-fluorouridine
  modified_base 15: mod_base = OTHER; note = 2'-O-methyladenosine
  modified_base 16: mod_base = OTHER; note = 2'-fluoroguanosine
  modified_base 17: mod_base = um
  modified_base 18: mod_base = um
  modified_base 19: mod_base = gm
  modified_base 20: mod_base = OTHER; note = 2'-O-methyladenosine
  modified_base 21: mod_base = OTHER; note = 2'-O-methylguanosine with a 3'-phosphorothioate linkage
  modified_base 22: mod_base = OTHER; note = 2'-O-methylguanosine with a 3'-phosphorothioate linkage
  modified_base 23: mod_base = OTHER; note = 2'-O-methyladenosine
tttggagttttgctagttgagga

SEQ ID NO: 233 - RNA, 23 nt, synthetic construct
  source 1..23: mol_type = other RNA
  modified_base 1: mod_base = OTHER; note = 2'-O-methyluridine with a 3'-phosphorothioate linkage
  modified_base 2: mod_base = OTHER; note = 2'-fluoroguanosine with a 3'-phosphorothioate linkage
  modified_base 3: mod_base = um
  modified_base 4: mod_base = gm
  modified_base 5: mod_base = OTHER; note = 2'-fluoroadenosine
  modified_base 6: mod_base = um
  modified_base 7: mod_base = OTHER; note = 2'-fluorocytidine
  modified_base 8: mod_base = gm
  modified_base 9: mod_base = OTHER; note = 2'-O-methyladenosine
  modified_base 10: mod_base = um
  modified_base 11: mod_base = um
  modified_base 12: mod_base = OTHER; note = 2'-O-methyladenosine
  modified_base 13: mod_base = gm
  modified_base 14: mod_base = OTHER; note = 2'-fluorouridine
  modified_base 15: mod_base = um
  modified_base 16: mod_base = OTHER; note = 2'-fluoroadenosine
  modified_base 17: mod_base = gm
  modified_base 18: mod_base = OTHER; note = 2'-O-methyladenosine
  modified_base 19: mod_base = gm
  modified_base 20: mod_base = OTHER; note = 2'-O-methyladenosine
  modified_base 21: mod_base = OTHER; note = 2'-O-methylguanosine with a 3'-phosphorothioate linkage
  modified_base 22: mod_base = OTHER; note = 2'-O-methylcytidine with a 3'-phosphorothioate linkage
  modified_base 23: mod_base = cm
tgtgatcgattagttagagagcc

SEQ ID NO: 234 - RNA, 23 nt, synthetic construct
  source 1..23: mol_type = other RNA
  modified_base 1: mod_base = OTHER; note = 2'-O-methyluridine with a 3'-phosphorothioate linkage
  modified_base 2: mod_base = OTHER; note = 2'-fluoroadenosine with a 3'-phosphorothioate linkage
  modified_base 3: mod_base = gm
  modified_base 4: mod_base = cm
  modified_base 5: mod_base = OTHER; note = 2'-fluorocytidine
  modified_base 6: mod_base = OTHER; note = 2'-O-methyladenosine
  modified_base 7: mod_base = OTHER; note = 2'-fluorouridine
  modified_base 8: mod_base = cm
  modified_base 9: mod_base = OTHER; note = 2'-O-methyladenosine
  modified_base 10: mod_base = OTHER; note = 2'-O-methyladenosine
  modified_base 11: mod_base = um
  modified_base 12: mod_base = um
  modified_base 13: mod_base = cm
  modified_base 14: mod_base = OTHER; note = 2'-fluorouridine
  modified_base 15: mod_base = OTHER; note = 2'-O-methyladenosine
  modified_base 16: mod_base = OTHER; note = 2'-fluoroadenosine
  modified_base 17: mod_base = um
  modified_base 18: mod_base = gm
  modified_base 19: mod_base = cm
  modified_base 20: mod_base = OTHER; note = 2'-O-methyladenosine
  modified_base 21: mod_base = OTHER; note = 2'-O-methylguanosine with a 3'-phosphorothioate linkage
  modified_base 22: mod_base = OTHER; note = 2'-O-methylguanosine with a 3'-phosphorothioate linkage
  modified_base 23: mod_base = OTHER; note = 2'-O-methyladenosine
tagccatcaattctaatgcagga

SEQ ID NO: 235 - RNA, 23 nt, synthetic construct
  source 1..23: mol_type = other RNA
  modified_base 1: mod_base = OTHER; note = 2'-O-methyluridine with a 3'-phosphorothioate linkage
  modified_base 2: mod_base = OTHER; note = 2'-fluorouridine with a 3'-phosphorothioate linkage
  modified_base 3: mod_base = cm
  modified_base 4: mod_base = gm
  modified_base 5: mod_base = OTHER; note = 2'-fluoroadenosine
  modified_base 6: mod_base = um
  modified_base 7: mod_base = OTHER; note = 2'-fluorouridine
  modified_base 8: mod_base = OTHER; note = 2'-O-methyladenosine
  modified_base 9: mod_base = gm
  modified_base 10: mod_base = um
  modified_base 11: mod_base = um
  modified_base 12: mod_base = OTHER; note = 2'-O-methyladenosine
  modified_base 13: mod_base = gm
  modified_base 14: mod_base = OTHER; note = 2'-fluoroadenosine
  modified_base 15: mod_base = gm
  modified_base 16: mod_base = OTHER; note = 2'-fluoroadenosine
  modified_base 17: mod_base = gm
  modified_base 18: mod_base = cm
  modified_base 19: mod_base = cm
  modified_base 20: mod_base = OTHER; note = 2'-O-methyladenosine
  modified_base 21: mod_base = OTHER; note = 2'-O-methylguanosine with a 3'-phosphorothioate linkage
  modified_base 22: mod_base = OTHER; note = 2'-O-methyluridine with a 3'-phosphorothioate linkage
  modified_base 23: mod_base = OTHER; note = 2'-O-methyladenosine
ttcgattagttagagagccagta

SEQ ID NO: 236 - RNA, 23 nt, synthetic construct
  source 1..23: mol_type = other RNA
  modified_base 1: mod_base = OTHER; note = 2'-O-methyluridine with a 3'-phosphorothioate linkage
  modified_base 2: mod_base = OTHER; note = 2'-fluoroguanosine with a 3'-phosphorothioate linkage
  modified_base 3: mod_base = cm
  modified_base 4: mod_base = um
  modified_base 5: mod_base = OTHER; note = 2'-fluorouridine
  modified_base 6: mod_base = um
  modified_base 7: mod_base = OTHER; note = 2'-fluoroadenosine
  modified_base 8: mod_base = cm
  modified_base 9: mod_base = OTHER; note = 2'-O-methyladenosine
  modified_base 10: mod_base = um
  modified_base 11: mod_base = um
  modified_base 12: mod_base = um
  modified_base 13: mod_base = um
  modified_base 14: mod_base = OTHER; note = 2'-fluorouridine
  modified_base 15: mod_base = cm
  modified_base 16: mod_base = OTHER; note = 2'-fluorouridine
  modified_base 17: mod_base = um
  modified_base 18: mod_base = cm
  modified_base 19: mod_base = um
  modified_base 20: mod_base = um
  modified_base 21: mod_base = OTHER; note = 2'-O-methylcytidine with a 3'-phosphorothioate linkage
  modified_base 22: mod_base = OTHER; note = 2'-O-methylcytidine with a 3'-phosphorothioate linkage
  modified_base 23: mod_base = um
tgctttacatttttcttcttcct

SEQ ID NO: 237 - RNA, 23 nt, synthetic construct
  source 1..23: mol_type = other RNA
  modified_base 1: mod_base = OTHER; note = 2'-O-methyluridine with a 3'-phosphorothioate linkage
  modified_base 2: mod_base = OTHER; note = 2'-fluoroguanosine with a 3'-phosphorothioate linkage
  modified_base 3: mod_base = OTHER; note = 2'-O-methyladenosine
  modified_base 4: mod_base = um
  modified_base 5: mod_base = OTHER; note = 2'-fluorocytidine
  modified_base 6: mod_base = um
  modified_base 7: mod_base = OTHER; note = 2'-fluoroguanosine
  modified_base 8: mod_base = um
  modified_base 9: mod_base = cm
  modified_base 10: mod_base = OTHER; note = 2'-O-methyladenosine
  modified_base 11: mod_base = um
  modified_base 12: mod_base = um
  modified_base 13: mod_base = gm
  modified_base 14: mod_base = OTHER; note = 2'-fluorouridine
  modified_base 15: mod_base = OTHER; note = 2'-O-methyladenosine
  modified_base 16: mod_base = OTHER; note = 2'-fluorouridine
  modified_base 17: mod_base = OTHER; note = 2'-O-methyladenosine
  modified_base 18: mod_base = OTHER; note = 2'-O-methyladenosine
  modified_base 19: mod_base = OTHER; note = 2'-O-methyladenosine
  modified_base 20: mod_base = OTHER; note = 2'-O-methyladenosine
  modified_base 21: mod_base = OTHER; note = 2'-O-methylcytidine with a 3'-phosphorothioate linkage
  modified_base 22: mod_base = OTHER; note = 2'-O-methyluridine with a 3'-phosphorothioate linkage
  modified_base 23: mod_base = gm
tgatctgtcattgtataaaactg

SEQ ID NO: 238 - RNA, 23 nt, synthetic construct
  source 1..23: mol_type = other RNA
  modified_base 1: mod_base = OTHER; note = 2'-O-methyluridine with a 3'-phosphorothioate linkage
  modified_base 2: mod_base = OTHER; note = 2'-fluoroadenosine with a 3'-phosphorothioate linkage
  modified_base 3: mod_base = gm
  modified_base 4: mod_base = OTHER; note = 2'-O-methyladenosine
  modified_base 5: mod_base = OTHER; note = 2'-fluorouridine
  modified_base 6: mod_base = um
  modified_base 7: mod_base = OTHER; note = 2'-fluorocytidine
  modified_base 8: mod_base = um
  modified_base 9: mod_base = um
  modified_base 10: mod_base = gm
  modified_base 11: mod_base = gm
  modified_base 12: mod_base = OTHER; note = 2'-O-methyladenosine
  modified_base 13: mod_base = gm
  modified_base 14: mod_base = OTHER; note = 2'-fluorouridine
  modified_base 15: mod_base = um
  modified_base 16: mod_base = OTHER; note = 2'-fluorouridine
  modified_base 17: mod_base = um
  modified_base 18: mod_base = gm
  modified_base 19: mod_base = cm
  modified_base 20: mod_base = um
  modified_base 21: mod_base = OTHER; note = 2'-O-methyladenosine with a 3'-phosphorothioate linkage
  modified_base 22: mod_base = OTHER; note = 2'-O-methylguanosine with a 3'-phosphorothioate linkage
  modified_base 23: mod_base = um
tagattcttggagttttgctagt

SEQ ID NO: 239 - RNA, 23 nt, synthetic construct
  source 1..23: mol_type = other RNA
  modified_base 1: mod_base = OTHER; note = 2'-O-methyluridine with a 3'-phosphorothioate linkage
  modified_base 2: mod_base = OTHER; note = 2'-fluorouridine with a 3'-phosphorothioate linkage
  modified_base 3: mod_base = gm
  modified_base 4: mod_base = gm
  modified_base 5: mod_base = OTHER; note = 2'-fluoroguanosine
  modified_base 6: mod_base = um
  modified_base 7: mod_base = OTHER; note = 2'-fluoroguanosine
  modified_base 8: mod_base = OTHER; note = 2'-O-methyladenosine
  modified_base 9: mod_base = um
  modified_base 10: mod_base = cm
  modified_base 11: mod_base = gm
  modified_base 12: mod_base = OTHER; note = 2'-O-methyladenosine
  modified_base 13: mod_base = um
  modified_base 14: mod_base = OTHER; note = 2'-fluorouridine
  modified_base 15: mod_base = OTHER; note = 2'-O-methyladenosine
  modified_base 16: mod_base = OTHER; note = 2'-fluoroguanosine
  modified_base 17: mod_base = um
  modified_base 18: mod_base = um
  modified_base 19: mod_base = OTHER; note = 2'-O-methyladenosine
  modified_base 20: mod_base = gm
  modified_base 21: mod_base = OTHER; note = 2'-O-methyladenosine with a 3'-phosphorothioate linkage
  modified_base 22: mod_base = OTHER; note = 2'-O-methylguanosine with a 3'-phosphorothioate linkage
  modified_base 23: mod_base = OTHER; note = 2'-O-methyladenosine
ttgggtgatcgattagttagaga

SEQ ID NO: 240 - RNA, 23 nt, synthetic construct
  source 1..23: mol_type = other RNA
  modified_base 1: mod_base = OTHER; note = 2'-O-methyluridine with a 3'-phosphorothioate linkage
  modified_base 2: mod_base = OTHER; note = 2'-fluoroadenosine with a 3'-phosphorothioate linkage
  modified_base 3: mod_base = um
  modified_base 4: mod_base = cm
  modified_base 5: mod_base = OTHER; note = 2'-fluoroguanosine
  modified_base 6: mod_base = OTHER; note = 2'-O-methyladenosine
  modified_base 7: mod_base = OTHER; note = 2'-fluorouridine
  modified_base 8: mod_base = um
  modified_base 9: mod_base = OTHER; note = 2'-O-methyladenosine
  modified_base 10: mod_base = gm
  modified_base 11: mod_base = um
  modified_base 12: mod_base = um
  modified_base 13: mod_base = OTHER; note = 2'-O-methyladenosine
  modified_base 14: mod_base = OTHER; note = 2'-fluoroguanosine
  modified_base 15: mod_base = OTHER; note = 2'-O-methyladenosine
  modified_base 16: mod_base = OTHER; note = 2'-fluoroguanosine
  modified_base 17: mod_base = OTHER; note = 2'-O-methyladenosine
  modified_base 18: mod_base = gm
  modified_base 19: mod_base = cm
  modified_base 20: mod_base = cm
  modified_base 21: mod_base = OTHER; note = 2'-O-methyladenosine with a 3'-phosphorothioate linkage
  modified_base 22: mod_base = OTHER; note = 2'-O-methylguanosine with a 3'-phosphorothioate linkage
  modified_base 23: mod_base = um
tatcgattagttagagagccagt

SEQ ID NO: 241 - RNA, 23 nt, synthetic construct
  source 1..23: mol_type = other RNA
  modified_base 1: mod_base = OTHER; note = 2'-O-methyluridine with a 3'-phosphorothioate linkage
  modified_base 2: mod_base = OTHER; note = 2'-fluorouridine with a 3'-phosphorothioate linkage
  modified_base 3: mod_base = OTHER; note = 2'-O-methyladenosine
  modified_base 4: mod_base = um
  modified_base 5: mod_base = OTHER; note = 2'-fluorouridine
  modified_base 6: mod_base = OTHER; note = 2'-O-methyladenosine
  modified_base 7: mod_base = OTHER; note = 2'-fluoroadenosine
  modified_base 8: mod_base = um
  modified_base 9: mod_base = gm
  modified_base 10: mod_base = OTHER; note = 2'-O-methyladenosine
  modified_base 11: mod_base = gm
  modified_base 12: mod_base = um
  modified_base 13: mod_base = cm
  modified_base 14: mod_base = OTHER; note = 2'-fluoroadenosine
  modified_base 15: mod_base = um
  modified_base 16: mod_base = OTHER; note = 2'-fluoroadenosine
  modified_base 17: mod_base = cm
  modified_base 18: mod_base = um
  modified_base 19: mod_base = cm
  modified_base 20: mod_base = um
  modified_base 21: mod_base = OTHER; note = 2'-O-methyluridine with a 3'-phosphorothioate linkage
  modified_base 22: mod_base = OTHER; note = 2'-O-methylcytidine with a 3'-phosphorothioate linkage
  modified_base 23: mod_base = um
ttattaatgagtcatactcttct

SEQ ID NO: 242 - RNA, 23 nt, synthetic construct
  source 1..23: mol_type = other RNA
  modified_base 1: mod_base = OTHER; note = 2'-O-methyluridine with a 3'-phosphorothioate linkage
  modified_base 2: mod_base = OTHER; note = 2'-fluoroadenosine with a 3'-phosphorothioate linkage
  modified_base 3: mod_base = gm
  modified_base 4: mod_base = um
  modified_base 5: mod_base = OTHER; note = 2'-fluorouridine
  modified_base 6: mod_base = cm
  modified_base 7: mod_base = OTHER; note = 2'-fluoroadenosine
  modified_base 8: mod_base = OTHER; note = 2'-O-methyladenosine
  modified_base 9: mod_base = OTHER; note = 2'-O-methyladenosine
  modified_base 10: mod_base = OTHER; note = 2'-O-methyladenosine
  modified_base 11: mod_base = OTHER; note = 2'-O-methyladenosine
  modified_base 12: mod_base = um
  modified_base 13: mod_base = um
  modified_base 14: mod_base = OTHER; note = 2'-fluoroguanosine
  modified_base 15: mod_base = gm
  modified_base 16: mod_base = OTHER; note = 2'-fluoroadenosine
  modified_base 17: mod_base = OTHER; note = 2'-O-methyladenosine
  modified_base 18: mod_base = OTHER; note = 2'-O-methyladenosine
  modified_base 19: mod_base = OTHER; note = 2'-O-methyladenosine
  modified_base 20: mod_base = um
  modified_base 21: mod_base = OTHER; note = 2'-O-methyluridine with a 3'-phosphorothioate linkage
  modified_base 22: mod_base = OTHER; note = 2'-O-methylcytidine with a 3'-phosphorothioate linkage
  modified_base 23: mod_base = cm
tagttcaaaaattggaaaattcc

SEQ ID NO: 243 - RNA, 23 nt, synthetic construct
  source 1..23: mol_type = other RNA
  modified_base 1: mod_base = OTHER; note = 2'-O-methyluridine with a 3'-phosphorothioate linkage
  modified_base 2: mod_base = OTHER; note = 2'-fluoroguanosine with a 3'-phosphorothioate linkage
  modified_base 3: mod_base = um
  modified_base 4: mod_base = um
  modified_base 5: mod_base = OTHER; note = 2'-fluorocytidine
  modified_base 6: mod_base = OTHER; note = 2'-O-methyladenosine
  modified_base 7: mod_base = OTHER; note = 2'-fluoroadenosine
  modified_base 8: mod_base = OTHER; note = 2'-O-methyladenosine
  modified_base 9: mod_base = OTHER; note = 2'-O-methyladenosine
  modified_base 10: mod_base = OTHER; note = 2'-O-methyladenosine
  modified_base 11: mod_base = um
  modified_base 12: mod_base = um
  modified_base 13: mod_base = gm
  modified_base 14: mod_base = OTHER; note = 2'-fluoroguanosine
  modified_base 15: mod_base = OTHER; note = 2'-O-methyladenosine
  modified_base 16: mod_base = OTHER; note = 2'-fluoroadenosine
  modified_base 17: mod_base = OTHER; note = 2'-O-methyladenosine
  modified_base 18: mod_base = OTHER; note = 2'-O-methyladenosine
  modified_base 19: mod_base = um
  modified_base 20: mod_base = um
  modified_base 21: mod_base = OTHER; note = 2'-O-methylcytidine with a 3'-phosphorothioate linkage
  modified_base 22: mod_base = OTHER; note = 2'-O-methylcytidine with a 3'-phosphorothioate linkage
  modified_base 23: mod_base = OTHER; note = 2'-O-methyladenosine
tgttcaaaaattggaaaattcca

SEQ ID NO: 244 - RNA, 23 nt, synthetic construct
  source 1..23: mol_type = other RNA
  modified_base 1: mod_base = OTHER; note = 2'-O-methyluridine with a 3'-phosphorothioate linkage
  modified_base 2: mod_base = OTHER; note = 2'-fluorouridine with a 3'-phosphorothioate linkage
  modified_base 3: mod_base = gm
  modified_base 4: mod_base = OTHER; note = 2'-O-methyladenosine
  modified_base 5: mod_base = OTHER; note = 2'-fluoroadenosine
  modified_base 6: mod_base = OTHER; note = 2'-O-methyladenosine
  modified_base 7: mod_base = OTHER; note = 2'-fluorouridine
  modified_base 8: mod_base = OTHER; note = 2'-O-methyladenosine
  modified_base 9: mod_base = OTHER; note = 2'-O-methyladenosine
  modified_base 10: mod_base = gm
  modified_base 11: mod_base = gm
  modified_base 12: mod_base = um
  modified_base 13: mod_base = OTHER; note = 2'-O-methyladenosine
  modified_base 14: mod_base = OTHER; note = 2'-fluorouridine
  modified_base 15: mod_base = OTHER; note = 2'-O-methyladenosine
  modified_base 16: mod_base = OTHER; note = 2'-fluorocytidine
  modified_base 17: mod_base = OTHER; note = 2'-O-methyladenosine
  modified_base 18: mod_base = um
  modified_base 19: mod_base = OTHER; note = 2'-O-methyladenosine
  modified_base 20: mod_base = OTHER; note = 2'-O-methyladenosine
  modified_base 21: mod_base = OTHER; note = 2'-O-methylcytidine with a 3'-phosphorothioate linkage
  modified_base 22: mod_base = OTHER; note = 2'-O-methylcytidine with a 3'-phosphorothioate linkage
  modified_base 23: mod_base = um
ttgaaataaggtatacataacct

SEQ ID NO: 245 - RNA, 23 nt, synthetic construct
  source 1..23: mol_type = other RNA
  modified_base 1: mod_base = OTHER; note = 2'-O-methyluridine with a 3'-phosphorothioate linkage
  modified_base 2: mod_base = OTHER; note = 2'-fluorouridine with a 3'-phosphorothioate linkage
  modified_base 3: mod_base = um
  modified_base 4: mod_base = um
  modified_base 5: mod_base = OTHER; note = 2'-fluorocytidine
  modified_base 6: mod_base = um
  modified_base 7: mod_base = OTHER; note = 2'-fluoroadenosine
  modified_base 8: mod_base = cm
  modified_base 9: mod_base = OTHER; note = 2'-O-methyladenosine
  modified_base 10: mod_base = OTHER; note = 2'-O-methyladenosine
  modified_base 11: mod_base = gm
  modified_base 12: mod_base = um
  modified_base 13: mod_base = um
  modified_base 14: mod_base = OTHER; note = 2'-fluorocytidine
  modified_base 15: mod_base = OTHER; note = 2'-O-methyladenosine
  modified_base 16: mod_base = OTHER; note = 2'-fluoroadenosine
  modified_base 17: mod_base = OTHER; note = 2'-O-methyladenosine
  modified_base 18: mod_base = OTHER; note = 2'-O-methyladenosine
  modified_base 19: mod_base = OTHER; note = 2'-O-methyladenosine
  modified_base 20: mod_base = um
  modified_base 21: mod_base = OTHER; note = 2'-O-methyluridine with a 3'-phosphorothioate linkage
  modified_base 22: mod_base = OTHER; note = 2'-O-methylguanosine with a 3'-phosphorothioate linkage
  modified_base 23: mod_base = gm
ttttctacaagttcaaaaattgg

SEQ ID NO: 246 - RNA, 23 nt, synthetic construct
  source 1..23: mol_type = other RNA
  modified_base 1: mod_base = OTHER; note = 2'-O-methyluridine with a 3'-phosphorothioate linkage
  modified_base 2: mod_base = OTHER; note = 2'-fluorocytidine with a 3'-phosphorothioate linkage
  modified_base 3: mod_base = um
  modified_base 4: mod_base = um
  modified_base 5: mod_base = OTHER; note = 2'-fluoroguanosine
  modified_base 6: mod_base = OTHER; note = 2'-O-methyladenosine
  modified_base 7: mod_base = OTHER; note = 2'-fluoroadenosine
  modified_base 8: mod_base = OTHER; note = 2'-O-methyladenosine
  modified_base 9: mod_base = um
  modified_base 10: mod_base = OTHER; note = 2'-O-methyladenosine
  modified_base 11: mod_base = OTHER; note = 2'-O-methyladenosine
  modified_base 12: mod_base = gm
  modified_base 13: mod_base = gm
  modified_base 14: mod_base = OTHER; note = 2'-fluorouridine
  modified_base 15: mod_base = OTHER; note = 2'-O-methyladenosine
  modified_base 16: mod_base = OTHER; note = 2'-fluorouridine
  modified_base 17: mod_base = OTHER; note = 2'-O-methyladenosine
  modified_base 18: mod_base = cm
  modified_base 19: mod_base = OTHER; note = 2'-O-methyladenosine
  modified_base 20: mod_base = um
  modified_base 21: mod_base = OTHER; note = 2'-O-methyladenosine with a 3'-phosphorothioate linkage
  modified_base 22: mod_base = OTHER; note = 2'-O-methyladenosine with a 3'-phosphorothioate linkage
  modified_base 23: mod_base = cm
tcttgaaataaggtatacataac

SEQ ID NO: 247 - RNA, 23 nt, synthetic construct
  source 1..23: mol_type = other RNA
  modified_base 1: mod_base = OTHER; note = 2'-O-methyluridine with a 3'-phosphorothioate linkage
  modified_base 2: mod_base = OTHER; note = 2'-fluorouridine with a 3'-phosphorothioate linkage
  modified_base 3: mod_base = OTHER; note = 2'-O-methyladenosine
  modified_base 4: mod_base = gm
  modified_base 5: mod_base = OTHER; note = 2'-fluoroadenosine
  modified_base 6: mod_base = um
  modified_base 7: mod_base = OTHER; note = 2'-fluoroadenosine
  modified_base 8: mod_base = gm
  modified_base 9: mod_base = cm
  modified_base 10: mod_base = OTHER; note = 2'-O-methyladenosine
  modified_base 11: mod_base = um
  modified_base 12: mod_base = cm
  modified_base 13: mod_base = cm
  modified_base 14: mod_base = OTHER; note = 2'-fluorouridine
  modified_base 15: mod_base = um
  modified_base 16: mod_base = OTHER; note = 2'-fluoroguanosine
  modified_base 17: mod_base = OTHER; note = 2'-O-methyladenosine
  modified_base 18: mod_base = cm
  modified_base 19: mod_base = um
  modified_base 20: mod_base = um
  modified_base 21: mod_base = OTHER; note = 2'-O-methylguanosine with a 3'-phosphorothioate linkage
  modified_base 22: mod_base = OTHER; note = 2'-O-methyladenosine with a 3'-phosphorothioate linkage
  modified_base 23: mod_base = OTHER; note = 2'-O-methyladenosine
ttagatagcatccttgacttgaa

SEQ ID NO: 248 - RNA, 23 nt, synthetic construct
  source 1..23: mol_type = other RNA
  modified_base 1: mod_base = OTHER; note = 2'-O-methyluridine with a 3'-phosphorothioate linkage
  modified_base 2: mod_base = OTHER; note = 2'-fluorocytidine with a 3'-phosphorothioate linkage
  modified_base 3: mod_base = OTHER; note = 2'-O-methyladenosine
  modified_base 4: mod_base = um
  modified_base 5: mod_base = OTHER; note = 2'-fluoroadenosine
  modified_base 6: mod_base = OTHER; note = 2'-O-methyladenosine
  modified_base 7: mod_base = OTHER; note = 2'-fluoroguanosine
  modified_base 8: mod_base = um
  modified_base 9: mod_base = um
  modified_base 10: mod_base = um
  modified_base 11: mod_base = gm
  modified_base 12: mod_base = OTHER; note = 2'-O-methyladenosine
  modified_base 13: mod_base = OTHER; note = 2'-O-methyladenosine
  modified_base 14: mod_base = OTHER; note = 2'-fluorouridine
  modified_base 15: mod_base = gm
  modified_base 16: mod_base = OTHER; note = 2'-fluoroadenosine
  modified_base 17: mod_base = um
  modified_base 18: mod_base = um
  modified_base 19: mod_base = cm
  modified_base 20: mod_base = um
  modified_base 21: mod_base = OTHER; note = 2'-O-methyluridine with a 3'-phosphorothioate linkage
  modified_base 22: mod_base = OTHER; note = 2'-O-methyluridine with a 3'-phosphorothioate linkage
  modified_base 23: mod_base = cm
tcataagtttgaatgattctttc

SEQ ID NO: 249 - RNA, 23 nt, synthetic construct
  source 1..23: mol_type = other RNA
  modified_base 1: mod_base = OTHER; note = 2'-O-methyluridine with a 3'-phosphorothioate linkage
  modified_base 2: mod_base = OTHER; note = 2'-fluorouridine with a 3'-phosphorothioate linkage
  modified_base 3: mod_base = um
  modified_base 4: mod_base = cm
  modified_base 5: mod_base = OTHER; note = 2'-fluoroguanosine
  modified_base 6: mod_base = OTHER; note = 2'-O-methyladenosine
  modified_base 7: mod_base = OTHER; note = 2'-fluoroadenosine
  modified_base 8: mod_base = gm
  modified_base 9: mod_base = OTHER; note = 2'-O-methyladenosine
  modified_base 10: mod_base = OTHER; note = 2'-O-methyladenosine
  modified_base 11: mod_base = OTHER; note = 2'-O-methyladenosine
  modified_base 12: mod_base = um
  modified_base 13: mod_base = OTHER; note = 2'-O-methyladenosine
  modified_base 14: mod_base = OTHER; note = 2'-fluorouridine
  modified_base 15: mod_base = OTHER; note = 2'-O-methyladenosine
  modified_base 16: mod_base = OTHER; note = 2'-fluoroadenosine
  modified_base 17: mod_base = gm
  modified_base 18: mod_base = cm
  modified_base 19: mod_base = OTHER; note = 2'-O-methyladenosine
  modified_base 20: mod_base = OTHER; note = 2'-O-methyladenosine
  modified_base 21: mod_base = OTHER; note = 2'-O-methyluridine with a 3'-phosphorothioate linkage
  modified_base 22: mod_base = OTHER; note = 2'-O-methyluridine with a 3'-phosphorothioate linkage
  modified_base 23: mod_base = cm
tttcgaagaaatataagcaattc

SEQ ID NO: 250 - RNA, 23 nt, synthetic construct
  source 1..23: mol_type = other RNA
  modified_base 1: mod_base = OTHER; note = 2'-O-methyluridine with a 3'-phosphorothioate linkage
  modified_base 2: mod_base = OTHER; note = 2'-fluoroadenosine with a 3'-phosphorothioate linkage
  modified_base 3: mod_base = um
  modified_base 4: mod_base = OTHER; note = 2'-O-methyladenosine
  modified_base 5: mod_base = OTHER; note = 2'-fluoroadenosine
  modified_base 6: mod_base = gm
  modified_base 7: mod_base = OTHER; note = 2'-fluoroguanosine
  modified_base 8: mod_base = OTHER; note = 2'-O-methyladenosine
  modified_base 9: mod_base = OTHER; note = 2'-O-methyladenosine
  modified_base 10: mod_base = um
  modified_base 11: mod_base = gm
  modified_base 12: mod_base = um
  modified_base 13: mod_base = cm
  modified_base 14: mod_base = OTHER; note = 2'-fluorouridine
  modified_base 15: mod_base = cm
  modified_base 16: mod_base = OTHER; note = 2'-fluoroguanosine
  modified_base 17: mod_base = OTHER; note = 2'-O-methyladenosine
  modified_base 18: mod_base = um
  modified_base 19: mod_base = OTHER; note = 2'-O-methyladenosine
  modified_base 20: mod_base = gm
  modified_base 21: mod_base = OTHER; note = 2'-O-methylcytidine with a 3'-phosphorothioate linkage
  modified_base 22: mod_base = OTHER; note = 2'-O-methylcytidine with a 3'-phosphorothioate linkage
  modified_base 23: mod_base = OTHER; note = 2'-O-methyladenosine
tataaggaatgtctcgatagcca

SEQ ID NO: 251 - RNA, 23 nt, synthetic construct
  source 1..23: mol_type = other RNA
  modified_base 1: mod_base = OTHER; note = 2'-O-methyluridine with a 3'-phosphorothioate linkage
  modified_base 2: mod_base = OTHER; note = 2'-fluoroguanosine with a 3'-phosphorothioate linkage
  modified_base 3: mod_base = OTHER; note = 2'-O-methyladenosine
  modified_base 4: mod_base = um
  modified_base 5: mod_base = OTHER; note = 2'-fluoroadenosine
  modified_base 6: mod_base = OTHER; note = 2'-O-methyladenosine
  modified_base 7: mod_base = OTHER; note = 2'-fluoroadenosine
  modified_base 8: mod_base = OTHER; note = 2'-O-methyladenosine
  modified_base 9: mod_base = gm
  modified_base 10: mod_base = OTHER; note = 2'-O-methyladenosine
  modified_base 11: mod_base = um
  modified_base 12: mod_base = um
  modified_base 13: mod_base = cm
  modified_base 14: mod_base = OTHER; note = 2'-fluorouridine
  modified_base 15: mod_base = um
  modified_base 16: mod_base = OTHER; note = 2'-fluoroguanosine
  modified_base 17: mod_base = gm
  modified_base 18: mod_base = OTHER; note = 2'-O-methyladenosine
  modified_base 19: mod_base = gm
  modified_base 20: mod_base = um
  modified_base 21: mod_base = OTHER; note = 2'-O-methyluridine with a 3'-phosphorothioate linkage
  modified_base 22: mod_base = OTHER; note = 2'-O-methyluridine with a 3'-phosphorothioate linkage
  modified_base 23: mod_base = um
tgataaaagattcttggagtttt

SEQ ID NO: 252 - RNA, 23 nt, synthetic construct
  source 1..23: mol_type = other RNA
  modified_base 1: mod_base = OTHER; note = 2'-O-methyluridine with a 3'-phosphorothioate linkage
  modified_base 2: mod_base = OTHER; note = 2'-fluorouridine with a 3'-phosphorothioate linkage
  modified_base 3: mod_base = cm
  modified_base 4: mod_base = OTHER; note = 2'-O-methyladenosine
  modified_base 5: mod_base = OTHER; note = 2'-fluoroadenosine
  modified_base 6: mod_base = OTHER; note = 2'-O-methyladenosine
  modified_base 7: mod_base = OTHER; note = 2'-fluoroadenosine
  modified_base 8: mod_base = OTHER; note = 2'-O-methyladenosine
  modified_base 9: mod_base = um
  modified_base 10: mod_base = um
  modified_base 11: mod_base = gm
  modified_base 12: mod_base = gm
  modified_base 13: mod_base = OTHER; note = 2'-O-methyladenosine
  modified_base 14: mod_base = OTHER; note = 2'-fluoroadenosine
  modified_base 15: mod_base = OTHER; note = 2'-O-methyladenosine
  modified_base 16: mod_base = OTHER; note = 2'-fluoroadenosine
  modified_base 17: mod_base = um
  modified_base 18: mod_base = um
  modified_base 19: mod_base = cm
  modified_base 20: mod_base = cm
  modified_base 21: mod_base = OTHER; note = 2'-O-methyladenosine with a 3'-phosphorothioate linkage
  modified_base 22: mod_base = OTHER; note = 2'-O-methylguanosine with a 3'-phosphorothioate linkage
  modified_base 23: mod_base = um
ttcaaaaattggaaaattccagt

SEQ ID NO: 253 - RNA, 23 nt, synthetic construct
  source 1..23: mol_type = other RNA
  modified_base 1: mod_base = OTHER; note = 2'-O-methyluridine with a 3'-phosphorothioate linkage
  modified_base 2: mod_base = OTHER; note = 2'-fluorouridine with a 3'-phosphorothioate linkage
  modified_base 3: mod_base = OTHER; note = 2'-O-methyladenosine
  modified_base 4: mod_base = OTHER; note = 2'-O-methyladenosine
  modified_base 5: mod_base = OTHER; note = 2'-fluoroguanosine
  modified_base 6: mod_base = um
  modified_base 7: mod_base = OTHER; note = 2'-fluorouridine
  modified_base 8: mod_base = um
  modified_base 9: mod_base = gm
  modified_base 10: mod_base = OTHER; note = 2'-O-methyladenosine
  modified_base 11: mod_base = OTHER; note = 2'-O-methyladenosine
  modified_base 12: mod_base = um
  modified_base 13: mod_base = gm
  modified_base 14: mod_base = OTHER; note = 2'-fluoroadenosine
  modified_base 15: mod_base = um
  modified_base 16: mod_base = OTHER; note = 2'-fluorouridine
  modified_base 17: mod_base = cm
  modified_base 18: mod_base = um
  modified_base 19: mod_base = um
  modified_base 20: mod_base = um
  modified_base 21: mod_base = OTHER; note = 2'-O-methylcytidine with a 3'-phosphorothioate linkage
  modified_base 22: mod_base = OTHER; note = 2'-O-methylguanosine with a 3'-phosphorothioate linkage
  modified_base 23: mod_base = OTHER; note = 2'-O-methyladenosine
ttaagtttgaatgattctttcga

SEQ ID NO: 254 - RNA, 23 nt, synthetic construct
  source 1..23: mol_type = other RNA
  modified_base 1: mod_base = OTHER; note = 2'-O-methyluridine with a 3'-phosphorothioate linkage
  modified_base 2: mod_base = OTHER; note = 2'-fluorouridine with a 3'-phosphorothioate linkage
  modified_base 3: mod_base = um
  modified_base 4: mod_base = um
  modified_base 5: mod_base = OTHER; note = 2'-fluorouridine
  modified_base 6: mod_base = OTHER; note = 2'-O-methyladenosine
  modified_base 7: mod_base = OTHER; note = 2'-fluoroadenosine
  modified_base 8: mod_base = OTHER; note = 2'-O-methyladenosine
  modified_base 9: mod_base = um
  modified_base 10: mod_base = OTHER; note = 2'-O-methyladenosine
  modified_base 11: mod_base = um
  modified_base 12: mod_base = um
  modified_base 13: mod_base = um
  modified_base 14: mod_base = OTHER; note = 2'-fluorocytidine
  modified_base 15: mod_base = cm
  modified_base 16: mod_base = OTHER; note = 2'-fluoroadenosine
  modified_base 17: mod_base = OTHER; note = 2'-O-methyladenosine
  modified_base 18: mod_base = um
  modified_base 19: mod_base = OTHER; note = 2'-O-methyladenosine
  modified_base 20: mod_base = OTHER; note = 2'-O-methyladenosine
  modified_base 21: mod_base = OTHER; note = 2'-O-methyladenosine with a 3'-phosphorothioate linkage
  modified_base 22: mod_base = OTHER; note = 2'-O-methylcytidine with a 3'-phosphorothioate linkage
  modified_base 23: mod_base = cm
tttttaaatatttccaataaacc

SEQ ID NO: 255 - RNA, 23 nt, synthetic construct
  source 1..23: mol_type = other RNA
  modified_base 1: mod_base = OTHER; note = 2'-O-methyluridine with a 3'-phosphorothioate linkage
  modified_base 2: mod_base = OTHER; note = 2'-fluoroadenosine with a 3'-phosphorothioate linkage
  modified_base 3: mod_base = um
  modified_base 4: mod_base = OTHER; note = 2'-O-methyladenosine
  modified_base 5: mod_base = OTHER; note = 2'-fluoroadenosine
  modified_base 6: mod_base = OTHER; note = 2'-O-methyladenosine
  modified_base 7: mod_base = OTHER; note = 2'-fluoroadenosine
  modified_base 8: mod_base = gm
  modified_base 9: mod_base = OTHER; note = 2'-O-methyladenosine
  modified_base 10: mod_base = um
  modified_base 11: mod_base = um
  modified_base 12: mod_base = cm
  modified_base 13: mod_base = um
  modified_base 14: mod_base = OTHER; note = 2'-fluorouridine
  modified_base 15: mod_base = gm
  modified_base 16: mod_base = OTHER; note = 2'-fluoroguanosine
  modified_base 17: mod_base = OTHER; note = 2'-O-methyladenosine
  modified_base 18: mod_base = gm
  modified_base 19: mod_base = um
  modified_base 20: mod_base = um
  modified_base 21: mod_base = OTHER; note = 2'-O-methyluridine with a 3'-phosphorothioate linkage
  modified_base 22: mod_base = OTHER; note = 2'-O-methyluridine with a 3'-phosphorothioate linkage
  modified_base 23: mod_base = gm
tataaaagattcttggagttttg

SEQ ID NO: 256 - RNA, 23 nt, synthetic construct
  source 1..23: mol_type = other RNA
  modified_base 1: mod_base = OTHER; note = 2'-O-methyluridine with a 3'-phosphorothioate linkage
  modified_base 2: mod_base = OTHER; note = 2'-fluoroguanosine with a 3'-phosphorothioate linkage
  modified_base 3: mod_base = OTHER; note = 2'-O-methyladenosine
  modified_base 4: mod_base = gm
  modified_base 5: mod_base = OTHER; note = 2'-fluoroadenosine
  modified_base 6: mod_base = OTHER; note = 2'-O-methyladenosine
  modified_base 7: mod_base = OTHER; note = 2'-fluoroadenosine
  modified_base 8: mod_base = OTHER; note = 2'-O-methyladenosine
  modified_base 9: mod_base = um
  modified_base 10: mod_base = gm
  modified_base 11: mod_base = um
  modified_base 12: mod_base = um
  modified_base 13: mod_base = um
  modified_base 14: mod_base = OTHER; note = 2'-fluorouridine
  modified_base 15: mod_base = cm
  modified_base 16: mod_base = OTHER; note = 2'-fluorouridine
  modified_base 17: mod_base = um
  modified_base 18: mod_base = cm
  modified_base 19: mod_base = um
  modified_base 20: mod_base = um
  modified_base 21: mod_base = OTHER; note = 2'-O-methylcytidine with a 3'-phosphorothioate linkage
  modified_base 22: mod_base = OTHER; note = 2'-O-methyladenosine with a 3'-phosphorothioate linkage
  modified_base 23: mod_base = cm
tgagaaaatgttttcttcttcac

SEQ ID NO: 257 - RNA, 23 nt, synthetic construct
  source 1..23: mol_type = other RNA
  modified_base 1: mod_base = OTHER; note = 2'-O-methyluridine with a 3'-phosphorothioate linkage
  modified_base 2: mod_base = OTHER; note = 2'-fluorouridine with a 3'-phosphorothioate linkage
  modified_base 3: mod_base = gm
  modified_base 4: mod_base = um
  modified_base 5: mod_base = OTHER; note = 2'-fluoroadenosine
  modified_base 6: mod_base = um
  modified_base 7: mod_base = OTHER; note = 2'-fluorocytidine
  modified_base 8: mod_base = um
  modified_base 9: mod_base = OTHER; note = 2'-O-methyladenosine
  modified_base 10: mod_base = OTHER; note = 2'-O-methyladenosine
  modified_base 11: mod_base = um
  modified_base 12: mod_base = um
  modified_base 13: mod_base = cm
  modified_base 14: mod_base = OTHER; note = 2'-fluorouridine
  modified_base 15: mod_base = um
  modified_base 16: mod_base = OTHER; note = 2'-fluorocytidine
  modified_base 17: mod_base = OTHER; note = 2'-O-methyladenosine
  modified_base 18: mod_base = cm
  modified_base 19: mod_base = cm
  modified_base 20: mod_base = gm
  modified_base 21: mod_base = OTHER; note = 2'-O-methyluridine with a 3'-phosphorothioate linkage
  modified_base 22: mod_base = OTHER; note = 2'-O-methylcytidine with a 3'-phosphorothioate linkage
  modified_base 23: mod_base = um
ttgtatctaattcttcaccgtct

SEQ ID NO: 258 - RNA, 23 nt, synthetic construct
  source 1..23: mol_type = other RNA
  modified_base 1: mod_base = OTHER; note = 2'-O-methyluridine with a 3'-phosphorothioate linkage
  modified_base 2: mod_base = OTHER; note = 2'-fluoroadenosine with a 3'-phosphorothioate linkage
  modified_base 3: mod_base = cm
  modified_base 4: mod_base = um
  modified_base 5: mod_base = OTHER; note = 2'-fluoroadenosine
  modified_base 6: mod_base = um
  modified_base 7: mod_base = OTHER; note = 2'-fluorouridine
  modified_base 8: mod_base = cm
  modified_base 9: mod_base = cm
  modified_base 10: mod_base = um
  modified_base 11: mod_base = OTHER; note = 2'-O-methyladenosine
  modified_base 12: mod_base = um
  modified_base 13: mod_base = um
  modified_base 14: mod_base = OTHER; note = 2'-fluorouridine
  modified_base 15: mod_base = OTHER; note = 2'-O-methyladenosine
  modified_base 16: mod_base = OTHER; note = 2'-fluoroguanosine
  modified_base 17: mod_base = um
  modified_base 18: mod_base = cm
  modified_base 19: mod_base = cm
  modified_base 20: mod_base = cm
  modified_base 21: mod_base = OTHER; note = 2'-O-methyluridine with a 3'-phosphorothioate linkage
  modified_base 22: mod_base = OTHER; note = 2'-O-methyluridine with a 3'-phosphorothioate linkage
  modified_base 23: mod_base = gm
tactattcctatttagtcccttg

SEQ ID NO: 259 - RNA, 23 nt, synthetic construct
  source 1..23: mol_type = other RNA
  modified_base 1: mod_base = OTHER; note = 2'-O-methyluridine with a 3'-phosphorothioate linkage
  modified_base 2: mod_base = OTHER; note = 2'-fluorouridine with a 3'-phosphorothioate linkage
  modified_base 3: mod_base = um
  modified_base 4: mod_base = OTHER; note = 2'-O-methyladenosine
  modified_base 5: mod_base = OTHER; note = 2'-fluoroguanosine
  modified_base 6: mod_base = OTHER; note = 2'-O-methyladenosine
  modified_base 7: mod_base = OTHER; note = 2'-fluorouridine
  modified_base 8: mod_base = um
  modified_base 9: mod_base = gm
  modified_base 10: mod_base = um
  modified_base 11: mod_base = um
  modified_base 12: mod_base = um
  modified_base 13: mod_base = um
  modified_base 14: mod_base = OTHER; note = 2'-fluorocytidine
  modified_base 15: mod_base = cm
  modified_base 16: mod_base = OTHER; note = 2'-fluoroadenosine
  modified_base 17: mod_base = um
  modified_base 18: mod_base = um
  modified_base 19: mod_base = um
  modified_base 20: mod_base = cm
  modified_base 21: mod_base = OTHER; note = 2'-O-methyluridine with a 3'-phosphorothioate linkage
  modified_base 22: mod_base = OTHER; note = 2'-O-methyluridine with a 3'-phosphorothioate linkage
  modified_base 23: mod_base = cm
tttagattgttttccatttcttc

SEQ ID NO: 260 - RNA, 23 nt, synthetic construct
  source 1..23: mol_type = other RNA
  modified_base 1: mod_base = OTHER; note = 2'-O-methyluridine with a 3'-phosphorothioate linkage
  modified_base 2: mod_base = OTHER; note = 2'-fluoroguanosine with a 3'-phosphorothioate linkage
  modified_base 3: mod_base = um
  modified_base 4: mod_base = gm
  modified_base 5: mod_base = OTHER; note = 2'-fluoroadenosine
  modified_base 6: mod_base = um
  modified_base 7: mod_base = OTHER; note = 2'-fluoroadenosine
  modified_base 8: mod_base = cm
  modified_base 9: mod_base = OTHER; note = 2'-O-methyladenosine
  modified_base 10: mod_base = gm
  modified_base 11: mod_base = OTHER; note = 2'-O-methyladenosine
  modified_base 12: mod_base = OTHER; note = 2'-O-methyladenosine
  modified_base 13: mod_base = gm
  modified_base 14: mod_base = OTHER; note = 2'-fluoroadenosine
  modified_base 15: mod_base = um
  modified_base 16: mod_base = OTHER; note = 2'-fluoroguanosine
  modified_base 17: mod_base = OTHER; note = 2'-O-methyladenosine
  modified_base 18: mod_base = cm
  modified_base 19: mod_base = cm
  modified_base 20: mod_base = um
  modified_base 21: mod_base = OTHER; note = 2'-O-methyluridine with a 3'-phosphorothioate linkage
  modified_base 22: mod_base = OTHER; note = 2'-O-methyluridine with a 3'-phosphorothioate linkage
  modified_base 23: mod_base = gm
tgtgatacagaagatgacctttg

SEQ ID NO: 261 - RNA, 23 nt, synthetic construct
  source 1..23: mol_type = other RNA
  modified_base 1: mod_base = OTHER; note = 2'-O-methyluridine with a 3'-phosphorothioate linkage
  modified_base 2: mod_base = OTHER; note = 2'-fluoroadenosine with a 3'-phosphorothioate linkage
  modified_base 3: mod_base = OTHER; note = 2'-O-methyladenosine
  modified_base 4: mod_base = cm
  modified_base 5: mod_base = OTHER; note = 2'-fluoroguanosine
  modified_base 6: mod_base = OTHER; note = 2'-O-methyladenosine
  modified_base 7: mod_base = OTHER; note = 2'-fluorouridine
  modified_base 8: mod_base = cm
  modified_base 9: mod_base = cm
  modified_base 10: mod_base = OTHER; note = 2'-O-methyladenosine
  modified_base 11: mod_base = um
  modified_base 12: mod_base = gm
  modified_base 13: mod_base = OTHER; note = 2'-O-methyladenosine
  modified_base 14: mod_base = OTHER; note = 2'-fluoroadenosine
  modified_base 15: mod_base = um
  modified_base 16: mod_base = OTHER; note = 2'-fluoroguanosine
  modified_base 17: mod_base = gm
  modified_base 18: mod_base = OTHER; note = 2'-O-methyladenosine
  modified_base 19: mod_base = cm
  modified_base 20: mod_base = um
  modified_base 21: mod_base = OTHER; note = 2'-O-methylguanosine with a 3'-phosphorothioate linkage
  modified_base 22: mod_base = OTHER; note = 2'-O-methyladenosine with a 3'-phosphorothioate linkage
  modified_base 23: mod_base = um
taacgatccatgaatggactgat

SEQ ID NO: 262 - RNA, 23 nt, synthetic construct
  source 1..23: mol_type = other RNA
  modified_base 1: mod_base = OTHER; note = 2'-O-methyluridine with a 3'-phosphorothioate linkage
  modified_base 2: mod_base = OTHER; note = 2'-fluorocytidine with a 3'-phosphorothioate linkage
  modified_base 3: mod_base = OTHER; note = 2'-O-methyladenosine
  modified_base 4: mod_base = OTHER; note = 2'-O-methyladenosine
  modified_base 5: mod_base = OTHER; note = 2'-fluoroguanosine
  modified_base 6: mod_base = um
  modified_base 7: mod_base = OTHER; note = 2'-fluorouridine
  modified_base 8: mod_base = cm
  modified_base 9: mod_base = OTHER; note = 2'-O-methyladenosine
  modified_base 10: mod_base = OTHER; note = 2'-O-methyladenosine
  modified_base 11: mod_base = OTHER; note = 2'-O-methyladenosine
  modified_base 12: mod_base = OTHER; note = 2'-O-methyladenosine
  modified_base 13: mod_base = OTHER; note = 2'-O-methyladenosine
  modified_base 14: mod_base = OTHER; note = 2'-fluorouridine
  modified_base 15: mod_base = um
  modified_base 16: mod_base = OTHER; note = 2'-fluoroguanosine
  modified_base 17: mod_base = gm
  modified_base 18: mod_base = OTHER; note = 2'-O-methyladenosine
  modified_base 19: mod_base = OTHER; note = 2'-O-methyladenosine
  modified_base 20: mod_base = OTHER; note = 2'-O-methyladenosine
  modified_base 21: mod_base = OTHER; note = 2'-O-methyladenosine with a 3'-phosphorothioate linkage
  modified_base 22: mod_base = OTHER; note = 2'-O-methyluridine with a 3'-phosphorothioate linkage
  modified_base 23: mod_base = um
tcaagttcaaaaattggaaaatt

SEQ ID NO: 263 - RNA, 23 nt, synthetic construct
  source 1..23: mol_type = other RNA
  modified_base 1: mod_base = OTHER; note = 2'-O-methyluridine with a 3'-phosphorothioate linkage
  modified_base 2: mod_base = OTHER; note = 2'-fluoroadenosine with a 3'-phosphorothioate linkage
  modified_base 3: mod_base = um
  modified_base 4: mod_base = OTHER; note = 2'-O-methyladenosine
  modified_base 5: mod_base = OTHER; note = 2'-fluoroguanosine
  modified_base 6: mod_base = um
  modified_base 7: mod_base = OTHER; note = 2'-fluorouridine
  modified_base 8: mod_base = cm
  modified_base 9: mod_base = OTHER; note = 2'-O-methyladenosine
  modified_base 10: mod_base = um
  modified_base 11: mod_base = OTHER; note = 2'-O-methyladenosine
  modified_base 12: mod_base = OTHER; note = 2'-O-methyladenosine
  modified_base 13: mod_base = OTHER; note = 2'-O-methyladenosine
  modified_base 14: mod_base = OTHER; note = 2'-fluorouridine
  modified_base 15: mod_base = um
  modified_base 16: mod_base = OTHER; note = 2'-fluoroguanosine
  modified_base 17: mod_base = um
  modified_base 18: mod_base = um
  modified_base 19: mod_base = gm
  modified_base 20: mod_base = OTHER; note = 2'-O-methyladenosine
  modified_base 21: mod_base = OTHER; note = 2'-O-methylguanosine with a 3'-phosphorothioate linkage
  modified_base 22: mod_base = OTHER; note = 2'-O-methyluridine with a 3'-phosphorothioate linkage
  modified_base 23: mod_base = gm
tatagttcataaattgttgagtg

SEQ ID NO: 264 - RNA, 23 nt, synthetic construct
  source 1..23: mol_type = other RNA
  modified_base 1: mod_base = OTHER; note = 2'-O-methyluridine with a 3'-phosphorothioate linkage
  modified_base 2: mod_base = OTHER; note = 2'-fluoroguanosine with a 3'-phosphorothioate linkage
  modified_base 3: mod_base = OTHER; note = 2'-O-methyladenosine
  modified_base 4: mod_base = OTHER; note = 2'-O-methyladenosine
  modified_base 5: mod_base = OTHER; note = 2'-fluoroguanosine
  modified_base 6: mod_base = OTHER; note = 2'-O-methyladenosine
  modified_base 7: mod_base = OTHER; note = 2'-fluoroadenosine
  modified_base 8: mod_base = OTHER; note = 2'-O-methyladenosine
  modified_base 9: mod_base = um
  modified_base 10: mod_base = OTHER; note = 2'-O-methyladenosine
  modified_base 11: mod_base = um
  modified_base 12: mod_base = OTHER; note = 2'-O-methyladenosine
  modified_base 13: mod_base = OTHER; note = 2'-O-methyladenosine
  modified_base 14: mod_base = OTHER; note = 2'-fluoroguanosine
  modified_base 15: mod_base = cm
  modified_base 16: mod_base = OTHER; note = 2'-fluoroadenosine
  modified_base 17: mod_base = OTHER; note = 2'-O-methyladenosine
  modified_base 18: mod_base = um
  modified_base 19: mod_base = um
  modified_base 20: mod_base = cm
  modified_base 21: mod_base = OTHER; note = 2'-O-methylguanosine with a 3'-phosphorothioate linkage
  modified_base 22: mod_base = OTHER; note = 2'-O-methylcytidine with a 3'-phosphorothioate linkage
  modified_base 23: mod_base = cm
tgaagaaatataagcaattcgcc

SEQ ID NO: 265 - RNA, 23 nt, synthetic construct
  source 1..23: mol_type = other RNA
  modified_base 1: mod_base = OTHER; note = 2'-O-methyluridine with a 3'-phosphorothioate linkage
  modified_base 2: mod_base = OTHER; note = 2'-fluorocytidine with a 3'-phosphorothioate linkage
  modified_base 3: mod_base = gm
  modified_base 4: mod_base = OTHER; note = 2'-O-methyladenosine
  modified_base 5: mod_base = OTHER; note = 2'-fluoroadenosine
  modified_base 6: mod_base = gm
  modified_base 7: mod_base = OTHER; note = 2'-fluoroadenosine
  modified_base 8: mod_base = OTHER; note = 2'-O-methyladenosine
  modified_base 9: mod_base = OTHER; note = 2'-O-methyladenosine
  modified_base 10: mod_base = um
  modified_base 11: mod_base = OTHER; note = 2'-O-methyladenosine
  modified_base 12: mod_base = um
  modified_base 13: mod_base = OTHER; note = 2'-O-methyladenosine
  modified_base 14: mod_base = OTHER; note = 2'-fluoroadenosine
  modified_base 15: mod_base = gm
  modified_base 16: mod_base = OTHER; note = 2'-fluorocytidine
  modified_base 17: mod_base = OTHER; note = 2'-O-methyladenosine
  modified_base 18: mod_base = OTHER; note = 2'-O-methyladenosine
  modified_base 19: mod_base = um
  modified_base 20: mod_base = um
  modified_base 21: mod_base = OTHER; note = 2'-O-methylcytidine with a 3'-phosphorothioate linkage
  modified_base 22: mod_base = OTHER; note = 2'-O-methylguanosine with a 3'-phosphorothioate linkage
  modified_base 23: mod_base = cm
tcgaagaaatataagcaattcgc

SEQ ID NO: 266 - RNA, 23 nt, synthetic construct
  source 1..23: mol_type = other RNA
  modified_base 1: mod_base = OTHER; note = 2'-O-methyluridine with a 3'-phosphorothioate linkage
  modified_base 2: mod_base = OTHER; note = 2'-fluorouridine with a 3'-phosphorothioate linkage
  modified_base 3: mod_base = um
  modified_base 4: mod_base = cm
  modified_base 5: mod_base = OTHER; note = 2'-fluorouridine
  modified_base 6: mod_base = OTHER; note = 2'-O-methyladenosine
  modified_base 7: mod_base = OTHER; note = 2'-fluorocytidine
  modified_base 8: mod_base = OTHER; note = 2'-O-methyladenosine
  modified_base 9: mod_base = OTHER; note = 2'-O-methyladenosine
  modified_base 10: mod_base = gm
  modified_base 11: mod_base = um
  modified_base 12: mod_base = um
  modified_base 13: mod_base = cm
  modified_base 14: mod_base = OTHER; note = 2'-fluoroadenosine
  modified_base 15: mod_base = OTHER; note = 2'-O-methyladenosine
  modified_base 16: mod_base = OTHER; note = 2'-fluoroadenosine
  modified_base 17: mod_base = OTHER; note = 2'-O-methyladenosine
  modified_base 18: mod_base = OTHER; note = 2'-O-methyladenosine
  modified_base 19: mod_base = um
  modified_base 20: mod_base = um
  modified_base 21: mod_base = OTHER; note = 2'-O-methylguanosine with a 3'-phosphorothioate linkage
  modified_base 22: mod_base = OTHER; note = 2'-O-methylguanosine with a 3'-phosphorothioate linkage
  modified_base 23: mod_base = OTHER; note = 2'-O-methyladenosine
tttctacaagttcaaaaattgga

SEQ ID NO: 267 - RNA, 23 nt, synthetic construct
  source 1..23: mol_type = other RNA
  modified_base 1: mod_base = OTHER; note = 2'-O-methyluridine with a 3'-phosphorothioate linkage
  modified_base 2: mod_base = OTHER; note = 2'-fluorouridine with a 3'-phosphorothioate linkage
  modified_base 3: mod_base = um
  modified_base 4: mod_base = um
  modified_base 5: mod_base = OTHER; note = 2'-fluoroadenosine
  modified_base 6: mod_base = cm
  modified_base 7: mod_base = OTHER; note = 2'-fluoroadenosine
  modified_base 8: mod_base = um
  modified_base 9: mod_base = um
  modified_base 10: mod_base = um
  modified_base 11: mod_base = um
  modified_base 12: mod_base = um
  modified_base 13: mod_base = cm
  modified_base 14: mod_base = OTHER; note = 2'-fluorouridine
  modified_base 15: mod_base = um
  modified_base 16: mod_base = OTHER; note = 2'-fluorocytidine
  modified_base 17: mod_base = um
  modified_base 18: mod_base = um
  modified_base 19: mod_base = cm
  modified_base 20: mod_base = cm
  modified_base 21: mod_base = OTHER; note = 2'-O-methyluridine with a 3'-phosphorothioate linkage
  modified_base 22: mod_base = OTHER; note = 2'-O-methylcytidine with a 3'-phosphorothioate linkage
  modified_base 23: mod_base = um
ttttacatttttcttcttcctct

SEQ ID NO: 268 - RNA, 23 nt, synthetic construct
  source 1..23: mol_type = other RNA
  modified_base 1: mod_base = OTHER; note = 2'-O-methyluridine with a 3'-phosphorothioate linkage
  modified_base 2: mod_base = OTHER; note = 2'-fluorouridine with a 3'-phosphorothioate linkage
  modified_base 3: mod_base = gm
  modified_base 4: mod_base = OTHER; note = 2'-O-methyladenosine
  modified_base 5: mod_base = OTHER; note = 2'-fluorouridine
  modified_base 6: mod_base = OTHER; note = 2'-O-methyladenosine
  modified_base 7: mod_base = OTHER; note = 2'-fluoroadenosine
  modified_base 8: mod_base = um
  modified_base 9: mod_base = gm
  modified_base 10: mod_base = OTHER; note = 2'-O-methyladenosine
  modified_base 11: mod_base = gm
  modified_base 12: mod_base = gm
  modified_base 13: mod_base = cm
  modified_base 14: mod_base = OTHER; note = 2'-fluorouridine
  modified_base 15: mod_base = um
  modified_base 16: mod_base = OTHER; note = 2'-fluoroadenosine
  modified_base 17: mod_base = um
  modified_base 18: mod_base = OTHER; note = 2'-O-methyladenosine
  modified_base 19: mod_base = cm
  modified_base 20: mod_base = cm
  modified_base 21: mod_base = OTHER; note = 2'-O-methyladenosine with a 3'-phosphorothioate linkage
  modified_base 22: mod_base = OTHER; note = 2'-O-methyluridine with a 3'-phosphorothioate linkage
  modified_base 23: mod_base = um
ttgataatgaggcttataccatt

SEQ ID NO: 269 - protein, 31 aa, synthetic construct
  SITE 2: note = 2-Aminoisobutyric Acid
  SITE 20: note = Lys at position 20 is chemically modified through conjugation to the epsilon-amino group of the K side-chain with (gamma-Glu)-CO-(CH2)14-CH3
HXEGTFTSDVSSYLEGQAAKEFIAWLVRGRG

SEQ ID NO: 270 - protein, 41 aa, synthetic construct
  SITE 31: note = D-phenylalanine
  SITE 33: note = D-proline
  SITE 34: note = Beta-cyclohexyl-L-alanine
  SITE 35: note = D-alanine
  SITE 41: note = Amidated isoleucine
GGGGEGGGGEGGGGEKEKEKGGGGSGGGGSFSPXAGPIDRI

SEQ ID NO: 271 - RNA, 21 nt, synthetic construct
  source 1..21: mol_type = other RNA
ctatggcagttgcaaaatata

SEQ ID NO: 272 - RNA, 21 nt, synthetic construct
  source 1..21: mol_type = other RNA
tatggcagttgcaaaatatta

SEQ ID NO: 273 - RNA, 21 nt, synthetic construct
  source 1..21: mol_type = other RNA
atggcagttgcaaaatattca

SEQ ID NO: 274 - RNA, 21 nt, synthetic construct
  source 1..21: mol_type = other RNA
ggcagttgcaaaatattcaga

SEQ ID NO: 275 - RNA, 21 nt, synthetic construct
  source 1..21: mol_type = other RNA
gcagttgcaaaatattcagga

SEQ ID NO: 276 - RNA, 21 nt, synthetic construct
  source 1..21: mol_type = other RNA
caatggtataagcctcattaa

SEQ ID NO: 277 - RNA, 21 nt, synthetic construct
  source 1..21: mol_type = other RNA
atggtataagcctcattatca

SEQ ID NO: 278 - RNA, 21 nt, synthetic construct
  source 1..21: mol_type = other RNA
gtataagcctcattatcaaaa

SEQ ID NO: 279 - RNA, 21 nt, synthetic construct
  source 1..21: mol_type = other RNA
tataagcctcattatcaaaaa

SEQ ID NO: 280 - RNA, 21 nt, synthetic construct
  source 1..21: mol_type = other RNA
aagggactaaataggaataga

SEQ ID NO: 281 - RNA, 21 nt, synthetic construct
  source 1..21: mol_type = other RNA
gggactaaataggaatagtta

SEQ ID NO: 282 - RNA, 21 nt, synthetic construct
  source 1..21: mol_type = other RNA
aaaggtcatcttctgtatcaa

SEQ ID NO: 283 - RNA, 21 nt, synthetic construct
  source 1..21: mol_type = other RNA
ttcctgatactgctgatttta

SEQ ID NO: 284 - RNA, 21 nt, synthetic construct
  source 1..21: mol_type = other RNA
tgaagaagaaaacattttcta

SEQ ID NO: 285 - RNA, 21 nt, synthetic construct
  source 1..21: mol_type = other RNA
tctcgaaagaatcattcaaaa

SEQ ID NO: 286 - RNA, 21 nt, synthetic construct
  source 1..21: mol_type = other RNA
ctcgaaagaatcattcaaaca

SEQ ID NO: 287 - RNA, 21 nt, synthetic construct
  source 1..21: mol_type = other RNA
tcgaaagaatcattcaaacta

SEQ ID NO: 288 - RNA, 21 nt, synthetic construct
  source 1..21: mol_type = other RNA
tagaagagtatgactcattaa

SEQ ID NO: 289 - RNA, 21 nt, synthetic construct
  source 1..21: mol_type = other RNA
agagtatgactcattaataga

SEQ ID NO: 290 - RNA, 21 nt, synthetic construct
  source 1..21: mol_type = other RNA
ttgcttatatttcttcgaaga

SEQ ID NO: 291 - RNA, 21 nt, synthetic construct
  source 1..21: mol_type = other RNA
tccttcttcatcttgatcata

SEQ ID NO: 292 - RNA, 21 nt, synthetic construct
  source 1..21: mol_type = other RNA
aaaagttcgagacttgcatta

SEQ ID NO: 293 - RNA, 21 nt, synthetic construct
  source 1..21: mol_type = other RNA
aaagttcgagacttgcattta

SEQ ID NO: 294 - RNA, 21 nt, synthetic construct
  source 1..21: mol_type = other RNA
ttcgagacttgcatttgaaaa

SEQ ID NO: 295 - RNA, 21 nt, synthetic construct
  source 1..21: mol_type = other RNA
actccaagaatcttttatcaa

SEQ ID NO: 296 - RNA, 21 nt, synthetic construct
  source 1..21: mol_type = other RNA
aagacggtgaagaattagata

SEQ ID NO: 297 - RNA, 21 nt, synthetic construct
  source 1..21: mol_type = other RNA
gacggtgaagaattagataca

SEQ ID NO: 298 - RNA, 21 nt, synthetic construct
  source 1..21: mol_type = other RNA
aatggaaaacaatctaaatca

SEQ ID NO: 299 - RNA, 21 nt, synthetic construct
  source 1..21: mol_type = other RNA
ggaagaagaaaaatgtaaaga

SEQ ID NO: 300 - RNA, 23 nt, synthetic construct
  source 1..23: mol_type = other RNA
ggaagagtatgactcattaataa

SEQ ID NO: 301 - RNA, 21 nt, synthetic construct
  source 1..21: mol_type = other RNA
cagagtatgactcattaataa

SEQ ID NO: 302 - RNA, 20 nt, synthetic construct
  source 1..20: mol_type = other RNA
agagtatgactcattaataa

SEQ ID NO: 303 - RNA, 21 nt, synthetic construct
  source 1..21: mol_type = other RNA
  modified_base 13: mod_base = OTHER; note = Thymine
aaactccaagaatcttttata

SEQ ID NO: 304 - RNA, 23 nt, synthetic construct
  source 1..23: mol_type = other RNA
ggaaactccaagaatcttttata

SEQ ID NO: 305 - RNA, 21 nt, synthetic construct
  source 1..21: mol_type = other RNA
caactccaagaatcttttata

SEQ ID NO: 306 - RNA, 20 nt, synthetic construct
  source 1..20: mol_type = other RNA
aactccaagaatcttttata

SEQ ID NO: 307 - RNA, 21 nt, synthetic construct
  source 1..21: mol_type = other RNA
aaactccaagaatcttttatg

SEQ ID NO: 308 - RNA, 21 nt, synthetic construct
  source 1..21: mol_type = other RNA
cactccaagaatcttttatca

SEQ ID NO: 309 - RNA, 23 nt, synthetic construct
  source 1..23: mol_type = other RNA
ggaactccaagaatcttttatca

SEQ ID NO: 310 - RNA, 21 nt, synthetic construct
  source 1..21: mol_type = other RNA
aactccaagaatctattatca

SEQ ID NO: 311 - RNA, 23 nt, synthetic construct
  source 1..23: mol_type = other RNA
  misc_feature 1..21: note = RNA
  misc_feature 22..23: note = DNA
aactccaagaatcttttatcatt

SEQ ID NO: 312 - RNA, 21 nt, synthetic construct
  source 1..21: mol_type = other RNA
aactccaagaatcttttatcg

SEQ ID NO: 313 - RNA, 21 nt, synthetic construct
  source 1..21: mol_type = other RNA
cggaagaagaaaaatgtaaaa

SEQ ID NO: 314 - RNA, 20 nt, synthetic construct
  source 1..20: mol_type = other RNA
ggaagaagaaaaatgtaaaa

SEQ ID NO: 315 - RNA, 21 nt, synthetic construct
  source 1..21: mol_type = other RNA
aggaagaagaaaaatgtaaag

SEQ ID NO: 316 - RNA, 21 nt, synthetic construct
  source 1..21: mol_type = other RNA
aggaagaaggaaaatgtaaaa

SEQ ID NO: 317 - RNA, 23 nt, synthetic construct
  source 1..23: mol_type = other RNA
ttgataatgaggcttataccatt

SEQ ID NO: 318 - RNA, 23 nt, synthetic construct
  source 1..23: mol_type = other RNA
ttattaatgagtcatactcttgg

SEQ ID NO: 319 - RNA, 23 nt, synthetic construct
  source 1..23: mol_type = other RNA
tagttcaaaaattggaaaattgg

SEQ ID NO: 320 - RNA, 23 nt, synthetic construct
  source 1..23: mol_type = other RNA
tcataagtttgaatgattcttgg

SEQ ID NO: 321 - RNA, 23 nt, synthetic construct
  source 1..23: mol_type = other RNA
tgataaaagattcttggagttgg

SEQ ID NO: 322 - RNA, 23 nt, synthetic construct
  source 1..23: mol_type = other RNA
tttagattgttttccatttctgg

SEQ ID NO: 323 - RNA, 23 nt, synthetic construct
  source 1..23: mol_type = other RNA
ttttacatttttcttcttcctgg

SEQ ID NO: 324 - RNA, 23 nt, synthetic construct
  source 1..23: mol_type = other RNA
tatattttgcaactgccatagta

SEQ ID NO: 325 - RNA, 23 nt, synthetic construct
  source 1..23: mol_type = other RNA
taatattttgcaactgccatagt

SEQ ID NO: 326 - RNA, 23 nt, synthetic construct
  source 1..23: mol_type = other RNA
tgaatattttgcaactgccatag

SEQ ID NO: 327 - RNA, 23 nt, synthetic construct
  source 1..23: mol_type = other RNA
tctgaatattttgcaactgccat

SEQ ID NO: 328 - RNA, 23 nt, synthetic construct
  source 1..23: mol_type = other RNA
tcctgaatattttgcaactgcca

SEQ ID NO: 329 - RNA, 23 nt, synthetic construct
  source 1..23: mol_type = other RNA
ttaatgaggcttataccattgtt

SEQ ID NO: 330 - RNA, 23 nt, synthetic construct
  source 1..23: mol_type = other RNA
tgataatgaggcttataccattg

SEQ ID NO: 331 - RNA, 23 nt, synthetic construct
  source 1..23: mol_type = other RNA
ttttgataatgaggcttatacca

SEQ ID NO: 332 - RNA, 23 nt, synthetic construct
  source 1..23: mol_type = other RNA
tttttgataatgaggcttatacc

SEQ ID NO: 333 - RNA, 23 nt, synthetic construct
  source 1..23: mol_type = other RNA
tctattcctatttagtcccttgt

SEQ ID NO: 334 - RNA, 23 nt, synthetic construct
  source 1..23: mol_type = other RNA
taactattcctatttagtccctt

SEQ ID NO: 335 - RNA, 23 nt, synthetic construct
  source 1..23: mol_type = other RNA
ttgatacagaagatgacctttgc

SEQ ID NO: 336 - RNA, 23 nt, synthetic construct
  source 1..23: mol_type = other RNA
taaaatcagcagtatcaggaaat

SEQ ID NO: 337 - RNA, 23 nt, synthetic construct
  source 1..23: mol_type = other RNA
tagaaaatgttttcttcttcacc

SEQ ID NO: 338 - RNA, 23 nt, synthetic construct
  source 1..23: mol_type = other RNA
ttttgaatgattctttcgagaaa

SEQ ID NO: 339 - RNA, 23 nt, synthetic construct
  source 1..23: mol_type = other RNA
tgtttgaatgattctttcgagaa

SEQ ID NO: 340 - RNA, 23 nt, synthetic construct
  source 1..23: mol_type = other RNA
tagtttgaatgattctttcgaga

SEQ ID NO: 341 - RNA, 23 nt, synthetic construct
  source 1..23: mol_type = other RNA
ttaatgagtcatactcttctact

SEQ ID NO: 342 - RNA, 23 nt, synthetic construct
  source 1..23: mol_type = other RNA
tctattaatgagtcatactcttc

SEQ ID NO: 343 - RNA, 23 nt, synthetic construct
  source 1..23: mol_type = other RNA
tcttcgaagaaatataagcaatt

SEQ ID NO: 344 - RNA, 23 nt, synthetic construct
  source 1..23: mol_type = other RNA
tatgatcaagatgaagaaggaag

SEQ ID NO: 345 - RNA, 23 nt, synthetic construct
  source 1..23: mol_type = other RNA
taatgcaagtctcgaacttttgc

SEQ ID NO: 346 - RNA, 23 nt, synthetic construct
  source 1..23: mol_type = other RNA
taaatgcaagtctcgaacttttg

SEQ ID NO: 347 - RNA, 23 nt, synthetic construct
  source 1..23: mol_type = other RNA
ttttcaaatgcaagtctcgaact

SEQ ID NO: 348 - RNA, 23 nt, synthetic construct
  source 1..23: mol_type = other RNA
ttgataaaagattcttggagttt

SEQ ID NO: 349 - RNA, 23 nt, synthetic construct
  source 1..23: mol_type = other RNA
tatctaattcttcaccgtcttca

SEQ ID NO: 350 - RNA, 23 nt, synthetic construct
  source 1..23: mol_type = other RNA
tgtatctaattcttcaccgtctt

SEQ ID NO: 351 - RNA, 23 nt, synthetic construct
  source 1..23: mol_type = other RNA
tgatttagattgttttccatttc

SEQ ID NO: 352 - RNA, 23 nt, synthetic construct
  source 1..23: mol_type = other RNA
tctttacatttttcttcttcctc

SEQ ID NO: 353 - RNA, 23 nt, synthetic construct
  source 1..23: mol_type = other RNA
ttattaatgagtcatactctttt

SEQ ID NO: 354 - RNA, 23 nt, synthetic construct
  source 1..23: mol_type = other RNA
ttattaatgagtcatactcttcc

SEQ ID NO: 355 - RNA, 21 nt, synthetic construct
  source 1..21: mol_type = other RNA
ttattaatgagtcatactctt

SEQ ID NO: 356 - RNA, 23 nt, synthetic construct
  source 1..23: mol_type = other RNA
ttattaatgagtcatactctgct

SEQ ID NO: 357 - RNA, 22 nt, synthetic construct
  source 1..22: mol_type = other RNA
ttattaatgagtcatactcttt

SEQ ID NO: 358 - RNA, 23 nt, synthetic construct
  source 1..23: mol_type = other RNA
tataaaagattcttggagtttcc

SEQ ID NO: 359 - RNA, 21 nt, synthetic construct
  source 1..21: mol_type = other RNA
tataaaagattcttggagttt

SEQ ID NO: 360 - RNA, 23 nt, synthetic construct
  source 1..23: mol_type = other RNA
tataaaagattcttggagtttgg

SEQ ID NO: 361 - RNA, 23 nt, synthetic construct
  source 1..23: mol_type = other RNA
tataaaagattcttggagttgtg

SEQ ID NO: 362 - RNA, 22 nt, synthetic construct
  source 1..22: mol_type = other RNA
tataaaagattcttggagtttt

SEQ ID NO: 363 - RNA, 23 nt, synthetic construct
  source 1..23: mol_type = other RNA
tgataaaagattcttggagttcc

SEQ ID NO: 364 - RNA, 21 nt, synthetic construct
  source 1..21: mol_type = other RNA
tgataaaagattcttggagtt

SEQ ID NO: 365 - RNA, 23 nt, synthetic construct
  source 1..23: mol_type = other RNA
tgataatagattcttggagtttt

SEQ ID NO: 366 - RNA, 23 nt, synthetic construct
  source 1..23: mol_type = other RNA
tgataaaagattcttggagtgtt

SEQ ID NO: 367 - RNA, 23 nt, synthetic construct
  source 1..23: mol_type = other RNA
ttttacatttttcttcttccgct

SEQ ID NO: 368 - RNA, 22 nt, synthetic construct
  source 1..22: mol_type = other RNA
ttttacatttttcttcttcctt

SEQ ID NO: 369 - RNA, 21 nt, synthetic construct
  source 1..21: mol_type = other RNA
  modified_base 1: mod_base = OTHER; note = 2'-O-methyladenosine with a 3'-phosphorothioate linkage and a 5' inverted abasic moiety connected via a 5' to 5' phosphorothioate linkage
  modified_base 2: mod_base = OTHER; note = 2'-O-methyladenosine
  modified_base 3: mod_base = gm
  modified_base 4: mod_base = OTHER; note = 2'-O-methyladenosine
  modified_base 5: mod_base = gm
  modified_base 6: mod_base = um
  modified_base 7: mod_base = OTHER; note = 2'-O-methyladenosine
  modified_base 8: mod_base = um
  modified_base 9: mod_base = OTHER; note = 2'-fluoroguanosine
  modified_base 10: mod_base = OTHER; note = 2'-fluoroadenosine
  modified_base 11: mod_base = OTHER; note = 2'-fluorocytidine
  modified_base 12: mod_base = um
  modified_base 13: mod_base = cm
  modified_base 14: mod_base = OTHER; note = 2'-O-methyladenosine
  modified_base 15: mod_base = um
  modified_base 16: mod_base = um
  modified_base 17: mod_base = OTHER; note = 2'-O-methyladenosine
  modified_base 18: mod_base = OTHER; note = 2'-O-methyladenosine
  modified_base 19: mod_base = OTHER; note = 2'-O-methyluridine with a 3'-phosphorothioate linkage
  modified_base 20: mod_base = OTHER; note = 2'-O-methyladenosine with a 3'-phosphorothioate linkage
  modified_base 21: mod_base = OTHER; note = 2'-O-methyladenosine
aagagtatgactcattaataa

SEQ ID NO: 370 - RNA, 21 nt, synthetic construct
  source 1..21: mol_type = other RNA
  modified_base 1: mod_base = OTHER; note = 2'-O-methylcytidine with a 3'-phosphorothioate linkage and a 5' inverted abasic moiety connected via a 5' to 5' phosphorothioate linkage
  modified_base 2: mod_base = OTHER; note = 2'-O-methyladenosine
  modified_base 3: mod_base = OTHER; note = 2'-O-methyladenosine
  modified_base 4: mod_base = gm
  modified_base 5: mod_base = um
  modified_base 6: mod_base = cm
  modified_base 7: mod_base = OTHER; note = 2'-O-methyladenosine
  modified_base 8: mod_base = OTHER; note = 2'-O-methyladenosine
  modified_base 9: mod_base = OTHER; note = 2'-fluoroguanosine
  modified_base 10: mod_base = OTHER; note = 2'-fluoroguanosine
  modified_base 11: mod_base = OTHER; note = 2'-fluoroadenosine
  modified_base 12: mod_base = um
  modified_base 13: mod_base = gm
  modified_base 14: mod_base = cm
  modified_base 15: mod_base = um
  modified_base 16: mod_base = OTHER; note = 2'-O-methyladenosine
  modified_base 17: mod_base = um
  modified_base 18: mod_base = cm
  modified_base 19: mod_base = OTHER; note = 2'-O-methyluridine with a 3'-phosphorothioate linkage
  modified_base 20: mod_base = OTHER; note = 2'-O-methyladenosine with a 3'-phosphorothioate linkage
  modified_base 21: mod_base = OTHER; note = 2'-O-methyladenosine
caagtcaaggatgctatctaa

SEQ ID NO: 371 - RNA, 21 nt, synthetic construct
  source 1..21: mol_type = other RNA
  modified_base 1: mod_base = OTHER; note = 2'-O-methylguanosine with a 3'-phosphorothioate linkage and a 5' inverted abasic moiety connected via a 5' to 5' phosphorothioate linkage
  modified_base 2: mod_base = OTHER; note = 2'-O-methyladenosine
  modified_base 3: mod_base = OTHER; note = 2'-O-methyladenosine
  modified_base 4: mod_base = OTHER; note = 2'-O-methyladenosine
  modified_base 5: mod_base = gm
  modified_base 6: mod_base = OTHER; note = 2'-O-methyladenosine
  modified_base 7: mod_base = OTHER; note = 2'-O-methyladenosine
  modified_base 8: mod_base = um
  modified_base 9: mod_base = OTHER; note = 2'-fluorocytidine
  modified_base 10: mod_base = OTHER; note = 2'-fluoroadenosine
  modified_base 11: mod_base = OTHER; note = 2'-fluorouridine
  modified_base 12: mod_base = um
  modified_base 13: mod_base = cm
  modified_base 14: mod_base = OTHER; note = 2'-O-methyladenosine
  modified_base 15: mod_base = OTHER; note = 2'-O-methyladenosine
  modified_base 16: mod_base = OTHER; note = 2'-O-methyladenosine
  modified_base 17: mod_base = cm
  modified_base 18: mod_base = um
  modified_base 19: mod_base = OTHER; note = 2'-O-methyluridine with a 3'-phosphorothioate linkage
  modified_base 20: mod_base = OTHER; note = 2'-O-methyladenosine with a 3'-phosphorothioate linkage
  modified_base 21: mod_base = OTHER; note = 2'-O-methyladenosine
gaaagaatcattcaaacttaa

SEQ ID NO: 372 - RNA, 21 nt, synthetic construct
  source 1..21: mol_type = other RNA
  modified_base 1: mod_base = OTHER; note = 2'-O-methyladenosine with a 3'-phosphorothioate linkage and a 5' inverted abasic moiety connected via a 5' to 5' phosphorothioate linkage
  modified_base 2: mod_base = OTHER; note = 2'-O-methyladenosine
  modified_base 3: mod_base = gm
  modified_base 4: mod_base = OTHER; note = 2'-O-methyladenosine
  modified_base 5: mod_base = OTHER; note = 2'-O-methyladenosine
  modified_base 6: mod_base = um
  modified_base 7: mod_base = cm
  modified_base 8: mod_base = OTHER; note = 2'-O-methyladenosine
  modified_base 9: mod_base = OTHER; note = 2'-fluorouridine
  modified_base 10: mod_base = OTHER; note = 2'-fluorouridine
  modified_base 11: mod_base = OTHER; note = 2'-fluorocytidine
  modified_base 12: mod_base = OTHER; note = 2'-O-methyladenosine
  modified_base 13: mod_base = OTHER; note = 2'-O-methyladenosine
  modified_base 14: mod_base = OTHER; note = 2'-O-methyladenosine
  modified_base 15: mod_base = cm
  modified_base 16: mod_base = um
  modified_base 17: mod_base = um
  modified_base 18: mod_base = OTHER; note = 2'-O-methyladenosine
  modified_base 19: mod_base = OTHER; note = 2'-O-methyluridine with a 3'-phosphorothioate linkage
  modified_base 20: mod_base = OTHER; note = 2'-O-methylguanosine with a 3'-phosphorothioate linkage
  modified_base 21: mod_base = OTHER; note = 2'-O-methyladenosine
aagaatcattcaaacttatga

SEQ ID NO: 373 - RNA, 21 nt, synthetic construct
  source 1..21: mol_type = other RNA
  modified_base 1: mod_base = OTHER; note = 2'-O-methyluridine with a 3'-phosphorothioate linkage and a 5' inverted abasic moiety connected via a 5' to 5' phosphorothioate linkage
  modified_base 2: mod_base = OTHER; note = 2'-O-methyladenosine
  modified_base 3: mod_base = um
  modified_base 4: mod_base = gm
  modified_base 5: mod_base = um
  modified_base 6: mod_base = OTHER; note = 2'-O-methyladenosine
  modified_base 7: mod_base = um
  modified_base 8: mod_base = OTHER; note = 2'-O-methyladenosine
  modified_base 9: mod_base = OTHER; note = 2'-fluorocytidine
  modified_base 10: mod_base = OTHER; note = 2'-fluorocytidine
  modified_base 11: mod_base = OTHER; note = 2'-fluorouridine
  modified_base 12: mod_base = um
  modified_base 13: mod_base = OTHER; note = 2'-O-methyladenosine
  modified_base 14: mod_base = um
  modified_base 15: mod_base = um
  modified_base 16: mod_base = um
  modified_base 17: mod_base = cm
  modified_base 18: mod_base = OTHER; note = 2'-O-methyladenosine
  modified_base 19: mod_base = OTHER; note = 2'-O-methyladenosine with a 3'-phosphorothioate linkage
  modified_base 20: mod_base = OTHER; note = 2'-O-methylguanosine with a 3'-phosphorothioate linkage
  modified_base 21: mod_base = OTHER; note = 2'-O-methyladenosine
tatgtataccttatttcaaga

SEQ ID NO: 374 - RNA, 21 nt, synthetic construct
  source 1..21: mol_type = other RNA
  modified_base 1: mod_base = OTHER; note = 2'-O-methyladenosine with a 3'-phosphorothioate linkage and a 5' inverted abasic moiety connected via a 5' to 5' phosphorothioate linkage
  modified_base 2: mod_base = um
  modified_base 3: mod_base = um
  modified_base 4: mod_base = gm
  modified_base 5: mod_base = cm
  modified_base 6: mod_base = um
  modified_base 7: mod_base = um
  modified_base 8: mod_base = OTHER; note = 2'-O-methyladenosine
  modified_base 9: mod_base = OTHER; note = 2'-fluorouridine
  modified_base 10: mod_base = OTHER; note = 2'-fluoroadenosine
  modified_base 11: mod_base = OTHER; note = 2'-fluorouridine
  modified_base 12: mod_base = um
  modified_base 13: mod_base = um
  modified_base 14: mod_base = cm
  modified_base 15: mod_base = um
  modified_base 16: mod_base = um
  modified_base 17: mod_base = cm
  modified_base 18: mod_base = gm
  modified_base 19: mod_base = OTHER; note = 2'-O-methyladenosine with a 3'-phosphorothioate linkage
  modified_base 20: mod_base = OTHER; note = 2'-O-methyladenosine with a 3'-phosphorothioate linkage
  modified_base 21: mod_base = OTHER; note = 2'-O-methyladenosine
attgcttatatttcttcgaaa

SEQ ID NO: 375 - RNA, 21 nt, synthetic construct
  source 1..21: mol_type = other RNA
  modified_base 1: mod_base = OTHER; note = 2'-O-methyladenosine with a 3'-phosphorothioate linkage and a 5' inverted abasic moiety connected via a 5' to 5' phosphorothioate linkage
  modified_base 2: mod_base = OTHER; note = 2'-O-methyladenosine
  modified_base 3: mod_base = OTHER; note = 2'-O-methyladenosine
  modified_base 4: mod_base = cm
  modified_base 5: mod_base = um
  modified_base 6: mod_base = cm
  modified_base 7: mod_base = cm
  modified_base 8: mod_base = OTHER; note = 2'-O-methyladenosine
  modified_base 9: mod_base = OTHER; note = 2'-fluoroadenosine
  modified_base 10: mod_base = OTHER; note = 2'-fluoroguanosine
  modified_base 11: mod_base = OTHER; note = 2'-fluoroadenosine
  modified_base 12: mod_base = OTHER; note = 2'-O-methyladenosine
  modified_base 13: mod_base = um
  modified_base 14: mod_base = cm
  modified_base 15: mod_base = um
  modified_base 16: mod_base = um
  modified_base 17: mod_base = um
  modified_base 18: mod_base = um
  modified_base 19: mod_base = OTHER; note = 2'-O-methyladenosine with a 3'-phosphorothioate linkage
  modified_base 20: mod_base = OTHER; note = 2'-O-methyluridine with a 3'-phosphorothioate linkage
  modified_base 21: mod_base = OTHER; note = 2'-O-methyladenosine
aaactccaagaatcttttata

SEQ ID NO: 376 - RNA, 21 nt, synthetic construct
  source 1..21: mol_type = other RNA
  modified_base 1: mod_base = OTHER; note = 2'-O-methylguanosine with a 3'-phosphorothioate linkage and a 5' inverted abasic moiety connected via a 5' to 5' phosphorothioate linkage
  modified_base 2: mod_base = OTHER; note = 2'-O-methyladenosine
  modified_base 3: mod_base = OTHER; note = 2'-O-methyladenosine
  modified_base 4: mod_base = gm
  modified_base 5: mod_base = OTHER; note = 2'-O-methyladenosine
  modified_base 6: mod_base = OTHER; note = 2'-O-methyladenosine
  modified_base 7: mod_base = gm
  modified_base 8: mod_base = OTHER; note = 2'-O-methyladenosine
  modified_base 9: mod_base = OTHER; note = 2'-fluoroadenosine
  modified_base 10: mod_base = OTHER; note = 2'-fluoroadenosine
  modified_base 11: mod_base = OTHER; note = 2'-fluoroadenosine
  modified_base 12: mod_base = cm
  modified_base 13: mod_base = OTHER; note = 2'-O-methyladenosine
  modified_base 14: mod_base = um
  modified_base 15: mod_base = um
  modified_base 16: mod_base = um
  modified_base 17: mod_base = um
  modified_base 18: mod_base = cm
  modified_base 19: mod_base = OTHER; note = 2'-O-methyluridine with a 3'-phosphorothioate linkage
  modified_base 20: mod_base = OTHER; note = 2'-O-methylcytidine with a 3'-phosphorothioate linkage
  modified_base 21: mod_base = OTHER; note = 2'-O-methyladenosine
gaagaagaaaacattttctca

SEQ ID NO: 377 - RNA, 21 nt, synthetic construct
  source 1..21: mol_type = other RNA
  modified_base 1: mod_base = OTHER; note = 2'-O-methyladenosine with a 3'-phosphorothioate linkage and a 5' inverted abasic moiety connected via a 5' to 5' phosphorothioate linkage
  modified_base 2: mod_base = gm
  modified_base 3: mod_base = gm
  modified_base 4: mod_base = OTHER; note = 2'-O-methyladenosine
  modified_base 5: mod_base = OTHER; note = 2'-O-methyladenosine
  modified_base 6: mod_base = gm
  modified_base 7: mod_base = OTHER; note = 2'-O-methyladenosine
  modified_base 8: mod_base = OTHER; note = 2'-O-methyladenosine
  modified_base 9: mod_base = OTHER; note = 2'-fluoroguanosine
  modified_base 10: mod_base = OTHER; note = 2'-fluoroadenosine
  modified_base 11: mod_base = OTHER; note = 2'-fluoroadenosine
  modified_base 12: mod_base = OTHER; note = 2'-O-methyladenosine
  modified_base 13: mod_base = OTHER; note = 2'-O-methyladenosine
  modified_base 14: mod_base = OTHER; note = 2'-O-methyladenosine
  modified_base 15: mod_base = um
  modified_base 16: mod_base = gm
  modified_base 17: mod_base = um
  modified_base 18: mod_base = OTHER; note = 2'-O-methyladenosine
  modified_base 19: mod_base = OTHER; note = 2'-O-methyladenosine with a 3'-phosphorothioate linkage
  modified_base 20: mod_base = OTHER; note = 2'-O-methyladenosine with a 3'-phosphorothioate linkage
  modified_base 21: mod_base = OTHER; note = 2'-O-methyladenosine
aggaagaagaaaaatgtaaaa

SEQ ID NO: 378 - RNA, 21 nt, synthetic construct
  source 1..21: mol_type = other RNA
  modified_base 1: mod_base = OTHER; note = 2'-O-methyladenosine with a 3'-phosphorothioate linkage and a 5' inverted abasic moiety connected via a 5' to 5' phosphorothioate linkage
  modified_base 2: mod_base = OTHER; note = 2'-O-methyladenosine
  modified_base 3: mod_base = cm
  modified_base 4: mod_base = um
  modified_base 5: mod_base = cm
  modified_base 6: mod_base = cm
  modified_base 7: mod_base = OTHER; note = 2'-O-methyladenosine
  modified_base 8: mod_base = OTHER; note = 2'-O-methyladenosine
  modified_base 9: mod_base = OTHER; note = 2'-fluoroguanosine
  modified_base 10: mod_base = OTHER; note = 2'-fluoroadenosine
  modified_base 11: mod_base = OTHER; note = 2'-fluoroadenosine
  modified_base 12: mod_base = um
  modified_base 13: mod_base = cm
  modified_base 14: mod_base = um
  modified_base 15: mod_base = um
  modified_base 16: mod_base = um
  modified_base 17: mod_base = um
  modified_base 18: mod_base = OTHER; note = 2'-O-methyladenosine
  modified_base 19: mod_base = OTHER; note = 2'-O-methyluridine with a 3'-phosphorothioate linkage
  modified_base 20: mod_base = OTHER; note = 2'-O-methylcytidine with a 3'-phosphorothioate linkage
  modified_base 21: mod_base = OTHER; note = 2'-O-methyladenosine
aactccaagaatcttttatca

SEQ ID NO: 379 - RNA, 21 nt, synthetic construct
  source 1..21: mol_type = other RNA
  modified_base 1: mod_base = OTHER; note = 2'-O-methyladenosine with a 3'-phosphorothioate linkage and a 5' inverted abasic moiety connected via a 5' to 5' phosphorothioate linkage
  modified_base 2: mod_base = OTHER; note = 2'-O-methyladenosine
  modified_base 3: mod_base = um
  modified_base 4: mod_base = um
  modified_base 5: mod_base = um
  modified_base 6: mod_base = um
  modified_base 7: mod_base = um
  modified_base 8: mod_base = gm
  modified_base 9: mod_base = OTHER; note = 2'-fluoroadenosine
  modified_base 10: mod_base = OTHER; note = 2'-fluoroadenosine
  modified_base 11: mod_base = OTHER; note = 2'-fluorocytidine
  modified_base 12: mod_base = um
  modified_base 13: mod_base = um
  modified_base 14: mod_base = gm
  modified_base 15: mod_base = um
  modified_base 16: mod_base = OTHER; note = 2'-O-methyladenosine
  modified_base 17: mod_base = gm
  modified_base 18: mod_base = OTHER; note = 2'-O-methyladenosine
  modified_base 19: mod_base = OTHER; note = 2'-O-methyladenosine with a 3'-phosphorothioate linkage
  modified_base 20: mod_base = OTHER; note = 2'-O-methyladenosine with a 3'-phosphorothioate linkage
  modified_base 21: mod_base = OTHER; note = 2'-O-methyladenosine
aatttttgaacttgtagaaaa

SEQ ID NO: 380 - RNA, 21 nt, synthetic construct
  source 1..21: mol_type = other RNA
  modified_base 1: mod_base = OTHER; note = 2'-O-methylguanosine with a 3'-phosphorothioate linkage and a 5' inverted abasic moiety connected via a 5' to 5' phosphorothioate linkage
  modified_base 2: mod_base = cm
  modified_base 3: mod_base = um
  modified_base 4: mod_base = OTHER; note = 2'-O-methyladenosine
  modified_base 5: mod_base = um
  modified_base 6: mod_base = cm
  modified_base 7: mod_base = gm
  modified_base 8: mod_base = OTHER; note = 2'-O-methyladenosine
  modified_base 9: mod_base = OTHER; note = 2'-fluoroguanosine
  modified_base 10: mod_base = OTHER; note = 2'-fluoroadenosine
  modified_base 11: mod_base = OTHER; note = 2'-fluorocytidine
  modified_base 12: mod_base = OTHER; note = 2'-O-methyladenosine
  modified_base 13: mod_base = um
  modified_base 14: mod_base = um
  modified_base 15: mod_base = cm
  modified_base 16: mod_base = cm
  modified_base 17: mod_base = um
  modified_base 18: mod_base = um
  modified_base 19: mod_base = OTHER; note = 2'-O-methyladenosine with a 3'-phosphorothioate linkage
  modified_base 20: mod_base = OTHER; note = 2'-O-methyluridine with a 3'-phosphorothioate linkage
  modified_base 21: mod_base = OTHER; note = 2'-O-methyladenosine
gctatcgagacattccttata

SEQ ID NO: 381 - RNA, 21 nt, synthetic construct
  source 1..21: mol_type = other RNA
  modified_base 1: mod_base = OTHER; note = 2'-O-methylcytidine with a 3'-phosphorothioate linkage and a 5' inverted abasic moiety connected via a 5' to 5' phosphorothioate linkage
  modified_base 2: mod_base = um
  modified_base 3: mod_base = OTHER; note = 2'-O-methyladenosine
  modified_base 4: mod_base = OTHER; note = 2'-O-methyladenosine
  modified_base 5: mod_base = cm
  modified_base 6: mod_base = um
  modified_base 7: mod_base = OTHER; note = 2'-O-methyladenosine
  modified_base 8: mod_base = OTHER; note = 2'-O-methyladenosine
  modified_base 9: mod_base = OTHER; note = 2'-fluorouridine
  modified_base 10: mod_base = OTHER; note = 2'-fluorocytidine
  modified_base 11: mod_base = OTHER; note = 2'-fluoroguanosine
  modified_base 12: mod_base = OTHER; note = 2'-O-methyladenosine
  modified_base 13: mod_base = um
  modified_base 14: mod_base = cm
  modified_base 15: mod_base = OTHER; note = 2'-O-methyladenosine
  modified_base 16: mod_base = cm
  modified_base 17: mod_base = cm
  modified_base 18: mod_base = cm
  modified_base 19: mod_base = OTHER; note = 2'-O-methyladenosine with a 3'-phosphorothioate linkage
  modified_base 20: mod_base = OTHER; note = 2'-O-methyluridine with a 3'-phosphorothioate linkage
  modified_base 21: mod_base = OTHER; note = 2'-O-methyladenosine
ctaactaatcgatcacccata

SEQ ID NO: 382 - RNA, 21 nt, synthetic construct
  source 1..21: mol_type = other RNA
  modified_base 1: mod_base = OTHER; note = 2'-O-methylcytidine with a 3'-phosphorothioate linkage
  modified_base 2: mod_base = OTHER; note = 2'-O-methyluridine with a 3'-phosphorothioate linkage
  modified_base 3: mod_base = OTHER; note = 2'-O-methyladenosine
  modified_base 4: mod_base = um
  modified_base 5: mod_base = gm
  modified_base 6: mod_base = gm
  modified_base 7: mod_base = cm
  modified_base 8: mod_base = OTHER; note = 2'-O-methyladenosine
  modified_base 9: mod_base = OTHER; note = 2'-fluoroguanosine
  modified_base 10: mod_base = OTHER; note = 2'-fluorouridine
  modified_base 11: mod_base = OTHER; note = 2'-fluorouridine
  modified_base 12: mod_base = gm
  modified_base 13: mod_base = cm
  modified_base 14: mod_base = OTHER; note = 2'-O-methyladenosine
  modified_base 15: mod_base = OTHER; note = 2'-O-methyladenosine
  modified_base 16: mod_base = OTHER; note = 2'-O-methyladenosine
  modified_base 17: mod_base = OTHER; note = 2'-O-methyladenosine
  modified_base 18: mod_base = um
  modified_base 19: mod_base = OTHER; note = 2'-O-methyladenosine with a 3'-phosphorothioate linkage
  modified_base 20: mod_base = OTHER; note = 2'-O-methyluridine with a 3'-phosphorothioate linkage
  modified_base 21: mod_base = OTHER; note = 2'-O-methyladenosine
ctatggcagttgcaaaatata

SEQ ID NO: 383 - RNA, 21 nt, synthetic construct
  source 1..21: mol_type = other RNA
  modified_base 1: mod_base = OTHER; note = 2'-O-methyluridine with a 3'-phosphorothioate linkage
  modified_base 2: mod_base = OTHER; note = 2'-O-methyladenosine with a 3'-phosphorothioate linkage
  modified_base 3: mod_base = um
  modified_base 4: mod_base = gm
  modified_base 5: mod_base = gm
  modified_base 6: mod_base = cm
  modified_base 7: mod_base = OTHER; note = 2'-O-methyladenosine
  modified_base 8: mod_base = gm
  modified_base 9: mod_base = OTHER; note = 2'-fluorouridine
  modified_base 10: mod_base = OTHER; note = 2'-fluorouridine
  modified_base 11: mod_base = OTHER; note = 2'-fluoroguanosine
  modified_base 12: mod_base = cm
  modified_base 13: mod_base = OTHER; note = 2'-O-methyladenosine
  modified_base 14: mod_base = OTHER; note = 2'-O-methyladenosine
  modified_base 15: mod_base = OTHER; note = 2'-O-methyladenosine
  modified_base 16: mod_base = OTHER; note = 2'-O-methyladenosine
  modified_base 17: mod_base = um
  modified_base 18: mod_base = OTHER; note = 2'-O-methyladenosine
  modified_base 19: mod_base = OTHER; note = 2'-O-methyluridine with a 3'-phosphorothioate linkage
  modified_base 20: mod_base = OTHER; note = 2'-O-methyluridine with a 3'-phosphorothioate linkage
  modified_base 21: mod_base = OTHER; note = 2'-O-methyladenosine
tatggcagttgcaaaatatta

SEQ ID NO: 384 - RNA, 21 nt, synthetic construct
  source 1..21: mol_type = other RNA
  modified_base 1: mod_base = OTHER; note = 2'-O-methyladenosine with a 3'-phosphorothioate linkage
  modified_base 2: mod_base = OTHER; note = 2'-O-methyluridine with a 3'-phosphorothioate linkage
  modified_base 3: mod_base = gm
  modified_base 4: mod_base = gm
  modified_base 5: mod_base = cm
  modified_base 6: mod_base = OTHER; note = 2'-O-methyladenosine
  modified_base 7: mod_base = gm
  modified_base 8: mod_base = um
  modified_base 9: mod_base = OTHER; note = 2'-fluorouridine
  modified_base 10: mod_base = OTHER; note = 2'-fluoroguanosine
  modified_base 11: mod_base = OTHER; note = 2'-fluorocytidine
  modified_base 12: mod_base = OTHER; note = 2'-O-methyladenosine
  modified_base 13: mod_base = OTHER; note = 2'-O-methyladenosine
  modified_base 14: mod_base = OTHER; note = 2'-O-methyladenosine
  modified_base 15: mod_base = OTHER; note = 2'-O-methyladenosine
  modified_base 16: mod_base = um
  modified_base 17: mod_base = OTHER; note = 2'-O-methyladenosine
  modified_base 18: mod_base = um
  modified_base 19: mod_base = OTHER; note = 2'-O-methyluridine with a 3'-phosphorothioate linkage
  modified_base 20: mod_base = OTHER; note = 2'-O-methylcytidine with a 3'-phosphorothioate linkage
  modified_base 21: mod_base = OTHER; note = 2'-O-methyladenosine
atggcagttgcaaaatattca

SEQ ID NO: 385 - RNA, 21 nt, synthetic construct
  source 1..21: mol_type = other RNA
  modified_base 1: mod_base = OTHER; note = 2'-O-methylguanosine with a 3'-phosphorothioate linkage
  modified_base 2: mod_base = OTHER; note = 2'-O-methylguanosine with a 3'-phosphorothioate linkage
  modified_base 3: mod_base = cm
  modified_base 4: mod_base = OTHER; note = 2'-O-methyladenosine
  modified_base 5: mod_base = gm
  modified_base 6: mod_base = um
  modified_base 7: mod_base = um
  modified_base 8: mod_base = gm
  modified_base 9: mod_base = OTHER; note = 2'-fluorocytidine
  modified_base 10: mod_base = OTHER; note = 2'-fluoroadenosine
  modified_base 11: mod_base = OTHER; note = 2'-fluoroadenosine
  modified_base 12: mod_base = OTHER; note = 2'-O-methyladenosine
  modified_base 13: mod_base = OTHER; note = 2'-O-methyladenosine
  modified_base 14: mod_base = um
  modified_base 15: mod_base = OTHER; note = 2'-O-methyladenosine
  modified_base 16: mod_base = um
  modified_base 17: mod_base = um
  modified_base 18: mod_base = cm
  modified_base 19: mod_base = OTHER; note = 2'-O-methyladenosine with a 3'-phosphorothioate linkage
  modified_base 20: mod_base = OTHER; note = 2'-O-methylguanosine with a 3'-phosphorothioate linkage
  modified_base 21: mod_base = OTHER; note = 2'-O-methyladenosine
ggcagttgcaaaatattcaga

SEQ ID NO: 386 - RNA, 21 nt, synthetic construct
  source 1..21: mol_type = other RNA
  modified_base 1: mod_base = OTHER; note = 2'-O-methylguanosine with a 3'-phosphorothioate linkage
  modified_base 2: mod_base = OTHER; note = 2'-O-methylcytidine with a 3'-phosphorothioate linkage
  modified_base 3: mod_base = OTHER; note = 2'-O-methyladenosine
  modified_base 4: mod_base = gm
  modified_base 5: mod_base = um
  modified_base 6: mod_base = um
  modified_base 7: mod_base = gm
  modified_base 8: mod_base = cm
  modified_base 9: mod_base = OTHER; note = 2'-fluoroadenosine
  modified_base 10: mod_base = OTHER; note = 2'-fluoroadenosine
  modified_base 11: mod_base = OTHER; note = 2'-fluoroadenosine
  modified_base 12: mod_base = OTHER; note = 2'-O-methyladenosine
  modified_base 13: mod_base = um
  modified_base 14: mod_base = OTHER; note = 2'-O-methyladenosine
  modified_base 15: mod_base = um
  modified_base 16: mod_base = um
  modified_base 17: mod_base = cm
  modified_base 18: mod_base = OTHER; note = 2'-O-methyladenosine
  modified_base 19: mod_base = OTHER; note = 2'-O-methylguanosine with a 3'-phosphorothioate linkage
  modified_base 20: mod_base = OTHER; note = 2'-O-methylguanosine with a 3'-phosphorothioate linkage
  modified_base 21: mod_base = OTHER; note = 2'-O-methyladenosine
gcagttgcaaaatattcagga

SEQ ID NO: 387 - RNA, 21 nt, synthetic construct
  source 1..21: mol_type = other RNA
  modified_base 1: mod_base = OTHER; note = 2'-O-methylcytidine with a 3'-phosphorothioate linkage
  modified_base 2: mod_base = OTHER; note = 2'-O-methyladenosine with a 3'-phosphorothioate linkage
  modified_base 3: mod_base = OTHER; note = 2'-O-methyladenosine
  modified_base 4: mod_base = um
  modified_base 5: mod_base = gm
  modified_base 6: mod_base = gm
  modified_base 7: mod_base = um
  modified_base 8: mod_base = OTHER; note = 2'-O-methyladenosine
  modified_base 9: mod_base = OTHER; note = 2'-fluorouridine
  modified_base 10: mod_base = OTHER; note = 2'-fluoroadenosine
  modified_base 11: mod_base = OTHER; note = 2'-fluoroadenosine
  modified_base 12: mod_base = gm
  modified_base 13: mod_base = cm
  modified_base 14: mod_base = cm
  modified_base 15: mod_base = um
  modified_base 16: mod_base = cm
  modified_base 17: mod_base = OTHER; note = 2'-O-methyladenosine
  modified_base 18: mod_base = um
  modified_base 19: mod_base = OTHER; note = 2'-O-methyluridine with a 3'-phosphorothioate linkage
  modified_base 20: mod_base = OTHER; note = 2'-O-methyladenosine with a 3'-phosphorothioate linkage
  modified_base 21: mod_base = OTHER; note = 2'-O-methyladenosine
caatggtataagcctcattaa

SEQ ID NO: 388 - RNA, 21 nt, synthetic construct
  source 1..21: mol_type = other RNA
  modified_base 1: mod_base = OTHER; note = 2'-O-methyladenosine with a 3'-phosphorothioate linkage
  modified_base 2: mod_base = OTHER; note = 2'-O-methyluridine with a 3'-phosphorothioate linkage
  modified_base 3: mod_base = gm
  modified_base 4: mod_base = gm
  modified_base 5: mod_base = um
  modified_base 6: mod_base = OTHER; note = 2'-O-methyladenosine
  modified_base 7: mod_base = um
  modified_base 8: mod_base = OTHER; note = 2'-O-methyladenosine
  modified_base 9: mod_base = OTHER; note = 2'-fluoroadenosine
  modified_base 10: mod_base = OTHER; note = 2'-fluoroguanosine
  modified_base 11: mod_base = OTHER; note = 2'-fluorocytidine
  modified_base 12: mod_base = cm
  modified_base 13: mod_base = um
  modified_base 14: mod_base = cm
  modified_base 15: mod_base = OTHER; note = 2'-O-methyladenosine
  modified_base 16: mod_base = um
  modified_base 17: mod_base = um
  modified_base 18: mod_base = OTHER; note = 2'-O-methyladenosine
  modified_base 19: mod_base = OTHER; note = 2'-O-methyluridine with a 3'-phosphorothioate linkage
  modified_base 20: mod_base = OTHER; note = 2'-O-methylcytidine with a 3'-phosphorothioate linkage
  modified_base 21: mod_base = OTHER; note = 2'-O-methyladenosine
atggtataagcctcattatca

SEQ ID NO: 389 - RNA, 21 nt, synthetic construct
  source 1..21: mol_type = other RNA
  modified_base 1: mod_base = OTHER; note = 2'-O-methylguanosine with a 3'-phosphorothioate linkage
  modified_base 2: mod_base = OTHER; note = 2'-O-methyluridine with a 3'-phosphorothioate linkage
  modified_base 3: mod_base = OTHER; note = 2'-O-methyladenosine
  modified_base 4: mod_base = um
  modified_base 5: mod_base = OTHER; note = 2'-O-methyladenosine
  modified_base 6: mod_base = OTHER; note = 2'-O-methyladenosine
  modified_base 7: mod_base = gm
  modified_base 8: mod_base = cm
  modified_base 9: mod_base = OTHER; note = 2'-fluorocytidine
  modified_base 10: mod_base = OTHER; note = 2'-fluorouridine
  modified_base 11: mod_base = OTHER; note = 2'-fluorocytidine
  modified_base 12: mod_base = OTHER; note = 2'-O-methyladenosine
  modified_base 13: mod_base = um
  modified_base 14: mod_base = um
  modified_base 15: mod_base = OTHER; note = 2'-O-methyladenosine
  modified_base 16: mod_base = um
  modified_base 17: mod_base = cm
  modified_base 18: mod_base = OTHER; note = 2'-O-methyladenosine
  modified_base 19: mod_base = OTHER; note = 2'-O-methyladenosine with a 3'-phosphorothioate linkage
  modified_base 20: mod_base = OTHER; note = 2'-O-methyladenosine with a 3'-phosphorothioate linkage
  modified_base 21: mod_base = OTHER; note = 2'-O-methyladenosine
gtataagcctcattatcaaaa

SEQ ID NO: 390 - RNA, 21 nt, synthetic construct
  source 1..21: mol_type = other RNA
  modified_base 1: mod_base = OTHER; note = 2'-O-methyluridine with a 3'-phosphorothioate linkage
  modified_base 2: mod_base = OTHER; note = 2'-O-methyladenosine with a 3'-phosphorothioate linkage
  modified_base 3: mod_base = um
  modified_base 4: mod_base = OTHER; note = 2'-O-methyladenosine
  modified_base 5: mod_base = OTHER; note = 2'-O-methyladenosine
  modified_base 6: mod_base = gm
  modified_base 7: mod_base = cm
  modified_base 8: mod_base = cm
  modified_base 9: mod_base = OTHER; note = 2'-fluorouridine
  modified_base 10: mod_base = OTHER; note = 2'-fluorocytidine
  modified_base 11: mod_base = OTHER; note = 2'-fluoroadenosine
  modified_base 12: mod_base = um
  modified_base 13: mod_base = um
  modified_base 14: mod_base = OTHER; note = 2'-O-methyladenosine
  modified_base 15: mod_base = um
  modified_base 16: mod_base = cm
  modified_base 17: mod_base = OTHER; note = 2'-O-methyladenosine
  modified_base 18: mod_base = OTHER; note = 2'-O-methyladenosine
  modified_base 19: mod_base = OTHER; note = 2'-O-methyladenosine with a 3'-phosphorothioate linkage
  modified_base 20: mod_base = OTHER; note = 2'-O-methyladenosine with a 3'-phosphorothioate linkage
  modified_base 21: mod_base = OTHER; note = 2'-O-methyladenosine
tataagcctcattatcaaaaa

SEQ ID NO: 391 - RNA, 21 nt, synthetic construct
  source 1..21: mol_type = other RNA
  modified_base 1: mod_base = OTHER; note = 2'-O-methyladenosine with a 3'-phosphorothioate linkage
  modified_base 2: mod_base = OTHER; note = 2'-O-methyladenosine with a 3'-phosphorothioate linkage
  modified_base 3: mod_base = gm
  modified_base 4: mod_base = gm
  modified_base 5: mod_base = gm
  modified_base 6: mod_base = OTHER; note = 2'-O-methyladenosine
  modified_base 7: mod_base = cm
  modified_base 8: mod_base = um
  modified_base 9: mod_base = OTHER; note = 2'-fluoroadenosine
  modified_base 10: mod_base = OTHER; note = 2'-fluoroadenosine
  modified_base 11: mod_base = OTHER; note = 2'-fluoroadenosine
  modified_base 12: mod_base = um
  modified_base 13: mod_base = OTHER; note = 2'-O-methyladenosine
  modified_base 14: mod_base = gm
  modified_base 15: mod_base = gm
  modified_base 16: mod_base = OTHER; note = 2'-O-methyladenosine
  modified_base 17: mod_base = OTHER; note = 2'-O-methyladenosine
  modified_base 18: mod_base = um
  modified_base 19: mod_base = OTHER; note = 2'-O-methyladenosine with a 3'-phosphorothioate linkage
  modified_base 20: mod_base = OTHER; note = 2'-O-methylguanosine with a 3'-phosphorothioate linkage
  modified_base 21: mod_base = OTHER; note = 2'-O-methyladenosine
aagggactaaataggaataga

SEQ ID NO: 392 - RNA, 21 nt, synthetic construct
  source 1..21: mol_type = other RNA
  modified_base 1: mod_base = OTHER; note = 2'-O-methylguanosine with a 3'-phosphorothioate linkage
  modified_base 2: mod_base = OTHER; note = 2'-O-methylguanosine with a 3'-phosphorothioate linkage
  modified_base 3: mod_base = gm
  modified_base 4: mod_base = OTHER; note = 2'-O-methyladenosine
  modified_base 5: mod_base = cm
  modified_base 6: mod_base = um
  modified_base 7: mod_base = OTHER; note = 2'-O-methyladenosine
  modified_base 8: mod_base = OTHER; note = 2'-O-methyladenosine
  modified_base 9: mod_base = OTHER; note = 2'-fluoroadenosine
  modified_base 10: mod_base = OTHER; note = 2'-fluorouridine
  modified_base 11: mod_base = OTHER; note = 2'-fluoroadenosine
  modified_base 12: mod_base = gm
  modified_base 13: mod_base = gm
  modified_base 14: mod_base = OTHER; note = 2'-O-methyladenosine
  modified_base 15: mod_base = OTHER; note = 2'-O-methyladenosine
  modified_base 16: mod_base = um
  modified_base 17: mod_base = OTHER; note = 2'-O-methyladenosine
  modified_base 18: mod_base = gm
  modified_base 19: mod_base = OTHER; note = 2'-O-methyluridine with a 3'-phosphorothioate linkage
  modified_base 20: mod_base = OTHER; note = 2'-O-methyluridine with a 3'-phosphorothioate linkage
  modified_base 21: mod_base = OTHER; note = 2'-O-methyladenosine
gggactaaataggaatagtta

SEQ ID NO: 393 - RNA, 21 nt, synthetic construct
  source 1..21: mol_type = other RNA
  modified_base 1: mod_base = OTHER; note = 2'-O-methyladenosine with a 3'-phosphorothioate linkage
  modified_base 2: mod_base = OTHER; note = 2'-O-methyladenosine with a 3'-phosphorothioate linkage
  modified_base 3: mod_base = OTHER; note = 2'-O-methyladenosine
  modified_base 4: mod_base = gm
  modified_base 5: mod_base = gm
  modified_base 6: mod_base = um
  modified_base 7: mod_base = cm
  modified_base 8: mod_base = OTHER; note = 2'-O-methyladenosine
  modified_base 9: mod_base = OTHER; note = 2'-fluorouridine
  modified_base 10: mod_base = OTHER; note = 2'-fluorocytidine
  modified_base 11: mod_base = OTHER; note = 2'-fluorouridine
  modified_base 12: mod_base = um
  modified_base 13: mod_base = cm
  modified_base 14: mod_base = um
  modified_base 15: mod_base = gm
  modified_base 16: mod_base = um
  modified_base 17: mod_base = OTHER; note = 2'-O-methyladenosine
  modified_base 18: mod_base = um
  modified_base 19: mod_base = OTHER; note = 2'-O-methylcytidine with a 3'-phosphorothioate linkage
  modified_base 20: mod_base = OTHER; note = 2'-O-methyladenosine with a 3'-phosphorothioate linkage
  modified_base 21: mod_base = OTHER; note = 2'-O-methyladenosine
aaaggtcatcttctgtatcaa

SEQ ID NO: 394 - RNA, 21 nt, synthetic construct
  source 1..21: mol_type = other RNA
  modified_base 1: mod_base = OTHER; note = 2'-O-methyluridine with a 3'-phosphorothioate linkage
  modified_base 2: mod_base = OTHER; note = 2'-O-methyluridine with a 3'-phosphorothioate linkage
  modified_base 3: mod_base = cm
  modified_base 4: mod_base = cm
  modified_base 5: mod_base = um
  modified_base 6: mod_base = gm
  modified_base 7: mod_base = OTHER; note = 2'-O-methyladenosine
  modified_base 8: mod_base = um
  modified_base 9: mod_base = OTHER; note = 2'-fluoroadenosine
  modified_base 10: mod_base = OTHER; note = 2'-fluorocytidine
  modified_base 11: mod_base = OTHER; note = 2'-fluorouridine
  modified_base 12: mod_base = gm
  modified_base 13: mod_base = cm
  modified_base 14: mod_base = um
  modified_base 15: mod_base = gm
  modified_base 16: mod_base = OTHER; note = 2'-O-methyladenosine
  modified_base 17: mod_base = um
  modified_base 18: mod_base = um
  modified_base 19: mod_base = OTHER; note = 2'-O-methyluridine with a 3'-phosphorothioate linkage
  modified_base 20: mod_base = OTHER; note = 2'-O-methyluridine with a 3'-phosphorothioate linkage
  modified_base 21: mod_base = OTHER; note = 2'-O-methyladenosine
ttcctgatactgctgatttta

SEQ ID NO: 395 - RNA, 21 nt, synthetic construct
  source 1..21: mol_type = other RNA
  modified_base 1: mod_base = OTHER; note = 2'-O-methyluridine with a 3'-phosphorothioate linkage
  modified_base 2: mod_base = OTHER; note = 2'-O-methylguanosine with a 3'-phosphorothioate linkage
  modified_base 3: mod_base = OTHER; note = 2'-O-methyladenosine
  modified_base 4: mod_base = OTHER; note = 2'-O-methyladenosine
  modified_base 5: mod_base = gm
  modified_base 6: mod_base = OTHER; note = 2'-O-methyladenosine
  modified_base 7: mod_base = OTHER; note = 2'-O-methyladenosine
  modified_base 8: mod_base = gm
  modified_base 9: mod_base = OTHER; note = 2'-fluoroadenosine
  modified_base 10: mod_base = OTHER; note = 2'-fluoroadenosine
  modified_base 11: mod_base = OTHER; note = 2'-fluoroadenosine
  modified_base 12: mod_base = OTHER; note = 2'-O-methyladenosine
  modified_base 13: mod_base = cm
  modified_base 14: mod_base = OTHER; note = 2'-O-methyladenosine
  modified_base 15: mod_base = um
  modified_base 16: mod_base = um
  modified_base 17: mod_base = um
  modified_base 18: mod_base = um
  modified_base 19: mod_base = OTHER; note = 2'-O-methylcytidine with a 3'-phosphorothioate linkage
  modified_base 20: mod_base = OTHER; note = 2'-O-methyluridine with a 3'-phosphorothioate linkage
  modified_base 21: mod_base = OTHER; note = 2'-O-methyladenosine
tgaagaagaaaacattttcta

SEQ ID NO: 396 - RNA, 21 nt, synthetic construct
  source 1..21: mol_type = other RNA
  modified_base 1: mod_base = OTHER; note = 2'-O-methyluridine with a 3'-phosphorothioate linkage
  modified_base 2: mod_base = OTHER; note = 2'-O-methylcytidine with a 3'-phosphorothioate linkage
  modified_base 3: mod_base = um
  modified_base 4: mod_base = cm
  modified_base 5: mod_base = gm
  modified_base 6: mod_base = OTHER; note = 2'-O-methyladenosine
  modified_base 7: mod_base = OTHER; note = 2'-O-methyladenosine
  modified_base 8: mod_base = OTHER; note = 2'-O-methyladenosine
  modified_base 9: mod_base = OTHER; note = 2'-fluoroguanosine
  modified_base 10: mod_base = OTHER; note = 2'-fluoroadenosine
  modified_base 11: mod_base = OTHER; note = 2'-fluoroadenosine
  modified_base 12: mod_base = um
  modified_base 13: mod_base = cm
  modified_base 14: mod_base = OTHER; note = 2'-O-methyladenosine
  modified_base 15: mod_base = um
  modified_base 16: mod_base = um
  modified_base 17: mod_base = cm
  modified_base 18: mod_base = OTHER; note = 2'-O-methyladenosine
  modified_base 19: mod_base = OTHER; note = 2'-O-methyladenosine with a 3'-phosphorothioate linkage
  modified_base 20: mod_base = OTHER; note = 2'-O-methyladenosine with a 3'-phosphorothioate linkage
  modified_base 21: mod_base = OTHER; note = 2'-O-methyladenosine
tctcgaaagaatcattcaaaa

SEQ ID NO: 397 - RNA, 21 nt, synthetic construct
  source 1..21: mol_type = other RNA
  modified_base 1: mod_base = OTHER; note = 2'-O-methylcytidine with a 3'-phosphorothioate linkage
  modified_base 2: mod_base = OTHER; note = 2'-O-methyluridine with a 3'-phosphorothioate linkage
  modified_base 3: mod_base = cm
  modified_base 4: mod_base = gm
  modified_base 5: mod_base = OTHER; note = 2'-O-methyladenosine
  modified_base 6: mod_base = OTHER; note = 2'-O-methyladenosine
  modified_base 7: mod_base = OTHER; note = 2'-O-methyladenosine
  modified_base 8: mod_base = gm
  modified_base 9: mod_base = OTHER; note = 2'-fluoroadenosine
  modified_base 10: mod_base = OTHER; note = 2'-fluoroadenosine
  modified_base 11: mod_base = OTHER; note = 2'-fluorouridine
  modified_base 12: mod_base = cm
  modified_base 13: mod_base = OTHER; note = 2'-O-methyladenosine
  modified_base 14: mod_base = um
  modified_base 15: mod_base = um
  modified_base 16: mod_base = cm
  modified_base 17: mod_base = OTHER; note = 2'-O-methyladenosine
  modified_base 18: mod_base = OTHER; note = 2'-O-methyladenosine
  modified_base 19: mod_base = OTHER; note = 2'-O-methyladenosine with a 3'-phosphorothioate linkage
  modified_base 20: mod_base = OTHER; note = 2'-O-methylcytidine with a 3'-phosphorothioate linkage
  modified_base 21: mod_base = OTHER; note = 2'-O-methyladenosine
ctcgaaagaatcattcaaaca

SEQ ID NO: 398 - RNA, 21 nt, synthetic construct
  source 1..21: mol_type = other RNA
  modified_base 1: mod_base = OTHER; note = 2'-O-methyluridine with a 3'-phosphorothioate linkage
  modified_base 2: mod_base = OTHER; note = 2'-O-methylcytidine with a 3'-phosphorothioate linkage
  modified_base 3: mod_base = gm
  modified_base 4: mod_base = OTHER; note = 2'-O-methyladenosine
  modified_base 5: mod_base = OTHER; note = 2'-O-methyladenosine
  modified_base 6: mod_base = OTHER; note = 2'-O-methyladenosine
  modified_base 7: mod_base = gm
  modified_base 8: mod_base = OTHER; note = 2'-O-methyladenosine
  modified_base 9: mod_base = OTHER; note = 2'-fluoroadenosine
  modified_base 10: mod_base = OTHER; note = 2'-fluorouridine
  modified_base 11: mod_base = OTHER; note = 2'-fluorocytidine
  modified_base 12: mod_base = OTHER; note = 2'-O-methyladenosine
  modified_base 13: mod_base = um
  modified_base 14: mod_base = um
  modified_base 15: mod_base = cm
  modified_base 16: mod_base = OTHER; note = 2'-O-methyladenosine
  modified_base 17: mod_base = OTHER; note = 2'-O-methyladenosine
  modified_base 18: mod_base = OTHER; note = 2'-O-methyladenosine
  modified_base 19: mod_base = OTHER; note = 2'-O-methylcytidine with a 3'-phosphorothioate linkage
  modified_base 20: mod_base = OTHER; note = 2'-O-methyluridine with a 3'-phosphorothioate linkage
  modified_base 21: mod_base = OTHER; note = 2'-O-methyladenosine
tcgaaagaatcattcaaacta

SEQ ID NO: 399 - RNA, 21 nt, synthetic construct
  source 1..21: mol_type = other RNA
  modified_base 1: mod_base = OTHER; note = 2'-O-methyluridine with a 3'-phosphorothioate linkage
  modified_base 2: mod_base = OTHER; note = 2'-O-methyladenosine with a 3'-phosphorothioate linkage
  modified_base 3: mod_base = gm
  modified_base 4: mod_base = OTHER; note = 2'-O-methyladenosine
  modified_base 5: mod_base = OTHER; note = 2'-O-methyladenosine
  modified_base 6: mod_base = gm
  modified_base 7: mod_base = OTHER; note = 2'-O-methyladenosine
  modified_base 8: mod_base = gm
  modified_base 9: mod_base = OTHER; note = 2'-fluorouridine
  modified_base 10: mod_base = OTHER; note = 2'-fluoroadenosine
  modified_base 11: mod_base = OTHER; note = 2'-fluorouridine
  modified_base 12: mod_base = gm
  modified_base 13: mod_base = OTHER; note = 2'-O-methyladenosine
  modified_base 14: mod_base = cm
  modified_base 15: mod_base = um
  modified_base 16: mod_base = cm
  modified_base 17: mod_base = OTHER; note = 2'-O-methyladenosine
  modified_base 18: mod_base = um
  modified_base 19: mod_base = OTHER; note = 2'-O-methyluridine with a 3'-phosphorothioate linkage
  modified_base 20: mod_base = OTHER; note = 2'-O-methyladenosine with a 3'-phosphorothioate linkage
  modified_base 21: mod_base = OTHER; note = 2'-O-methyladenosine
tagaagagtatgactcattaa

SEQ ID NO: 400 - RNA, 21 nt, synthetic construct
  source 1..21: mol_type = other RNA
  modified_base 1: mod_base = OTHER; note = 2'-O-methyladenosine with a 3'-phosphorothioate linkage
  modified_base 2: mod_base = OTHER; note = 2'-O-methylguanosine with a 3'-phosphorothioate linkage
  modified_base 3: mod_base = OTHER; note = 2'-O-methyladenosine
  modified_base 4: mod_base = gm
  modified_base 5: mod_base = um
  modified_base 6: mod_base = OTHER; note = 2'-O-methyladenosine
  modified_base 7: mod_base = um
  modified_base 8: mod_base = gm
  modified_base 9: mod_base = OTHER; note = 2'-fluoroadenosine
  modified_base 10: mod_base = OTHER; note = 2'-fluorocytidine
  modified_base 11: mod_base = OTHER; note = 2'-fluorouridine
  modified_base 12: mod_base = cm
  modified_base 13: mod_base = OTHER; note = 2'-O-methyladenosine
  modified_base 14: mod_base = um
  modified_base 15: mod_base = um
  modified_base 16: mod_base = OTHER; note = 2'-O-methyladenosine
  modified_base 17: mod_base = OTHER; note = 2'-O-methyladenosine
  modified_base 18: mod_base = um
  modified_base 19: mod_base = OTHER; note = 2'-O-methyladenosine with a 3'-phosphorothioate linkage
  modified_base 20: mod_base = OTHER; note = 2'-O-methylguanosine with a 3'-phosphorothioate linkage
  modified_base 21: mod_base = OTHER; note = 2'-O-methyladenosine
agagtatgactcattaataga

SEQ ID NO: 401 - RNA, 21 nt, synthetic construct
  source 1..21: mol_type = other RNA
  modified_base 1: mod_base = OTHER; note = 2'-O-methyluridine with a 3'-phosphorothioate linkage
  modified_base 2: mod_base = OTHER; note = 2'-O-methyluridine with a 3'-phosphorothioate linkage
  modified_base 3: mod_base = gm
  modified_base 4: mod_base = cm
  modified_base 5: mod_base = um
  modified_base 6: mod_base = um
  modified_base 7: mod_base = OTHER; note = 2'-O-methyladenosine
  modified_base 8: mod_base = um
  modified_base 9: mod_base = OTHER; note = 2'-fluoroadenosine
  modified_base 10: mod_base = OTHER; note = 2'-fluorouridine
  modified_base 11: mod_base = OTHER; note = 2'-fluorouridine
  modified_base 12: mod_base = um
  modified_base 13: mod_base = cm
  modified_base 14: mod_base = um
  modified_base 15: mod_base = um
  modified_base 16: mod_base = cm
  modified_base 17: mod_base = gm
  modified_base 18: mod_base = OTHER; note = 2'-O-methyladenosine
  modified_base 19: mod_base = OTHER; note = 2'-O-methyladenosine with a 3'-phosphorothioate linkage
  modified_base 20: mod_base = OTHER; note = 2'-O-methylguanosine with a 3'-phosphorothioate linkage
  modified_base 21: mod_base = OTHER; note = 2'-O-methyladenosine
ttgcttatatttcttcgaaga

SEQ ID NO: 402 - RNA, 21 nt, synthetic construct
  source 1..21: mol_type = other RNA
  modified_base 1: mod_base = OTHER; note = 2'-O-methyluridine with a 3'-phosphorothioate linkage
  modified_base 2: mod_base = OTHER; note = 2'-O-methylcytidine with a 3'-phosphorothioate linkage
  modified_base 3: mod_base = cm
  modified_base 4: mod_base = um
  modified_base 5: mod_base = um
  modified_base 6: mod_base = cm
  modified_base 7: mod_base = um
  modified_base 8: mod_base = um
  modified_base 9: mod_base = OTHER; note = 2'-fluorocytidine
  modified_base 10: mod_base = OTHER; note = 2'-fluoroadenosine
  modified_base 11: mod_base = OTHER; note = 2'-fluorouridine
  modified_base 12: mod_base = cm
  modified_base 13: mod_base = um
  modified_base 14: mod_base = um
  modified_base 15: mod_base = gm
  modified_base 16: mod_base = OTHER; note = 2'-O-methyladenosine
  modified_base 17: mod_base = um
  modified_base 18: mod_base = cm
  modified_base 19: mod_base = OTHER; note = 2'-O-methyladenosine with a 3'-phosphorothioate linkage
  modified_base 20: mod_base = OTHER; note = 2'-O-methyluridine with a 3'-phosphorothioate linkage
  modified_base 21: mod_base = OTHER; note = 2'-O-methyladenosine
tccttcttcatcttgatcata

SEQ ID NO: 403 - RNA, 21 nt, synthetic construct
  source 1..21: mol_type = other RNA
  modified_base 1: mod_base = OTHER; note = 2'-O-methyladenosine with a 3'-phosphorothioate linkage
  modified_base 2: mod_base = OTHER; note = 2'-O-methyladenosine with a 3'-phosphorothioate linkage
  modified_base 3: mod_base = OTHER; note = 2'-O-methyladenosine
  modified_base 4: mod_base = OTHER; note = 2'-O-methyladenosine
  modified_base 5: mod_base = gm
  modified_base 6: mod_base = um
  modified_base 7: mod_base = um
  modified_base 8: mod_base = cm
  modified_base 9: mod_base = OTHER; note = 2'-fluoroguanosine
  modified_base 10: mod_base = OTHER; note = 2'-fluoroadenosine
  modified_base 11: mod_base = OTHER; note = 2'-fluoroguanosine
  modified_base 12: mod_base = OTHER; note = 2'-O-methyladenosine
  modified_base 13: mod_base = cm
  modified_base 14: mod_base = um
  modified_base 15: mod_base = um
  modified_base 16: mod_base = gm
  modified_base 17: mod_base = cm
  modified_base 18: mod_base = OTHER; note = 2'-O-methyladenosine
  modified_base 19: mod_base = OTHER; note = 2'-O-methyluridine with a 3'-phosphorothioate linkage
  modified_base 20: mod_base = OTHER; note = 2'-O-methyluridine with a 3'-phosphorothioate linkage
  modified_base 21: mod_base = OTHER; note = 2'-O-methyladenosine
aaaagttcgagacttgcatta

SEQ ID NO: 404 - RNA, 21 nt, synthetic construct
  source 1..21: mol_type = other RNA
  modified_base 1: mod_base = OTHER; note = 2'-O-methyladenosine with a 3'-phosphorothioate linkage
  modified_base 2: mod_base = OTHER; note = 2'-O-methyladenosine with a 3'-phosphorothioate linkage
  modified_base 3: mod_base = OTHER; note = 2'-O-methyladenosine
  modified_base 4: mod_base = gm
  modified_base 5: mod_base = um
  modified_base 6: mod_base = um
  modified_base 7: mod_base = cm
  modified_base 8: mod_base = gm
  modified_base 9: mod_base = OTHER; note = 2'-fluoroadenosine
  modified_base 10: mod_base = OTHER; note = 2'-fluoroguanosine
  modified_base 11: mod_base = OTHER; note = 2'-fluoroadenosine
  modified_base 12: mod_base = cm
  modified_base 13: mod_base = um
  modified_base 14: mod_base = um
  modified_base 15: mod_base = gm
  modified_base 16: mod_base = cm
  modified_base 17: mod_base = OTHER; note = 2'-O-methyladenosine
  modified_base 18: mod_base = um
  modified_base 19: mod_base = OTHER; note = 2'-O-methyluridine with a 3'-phosphorothioate linkage
  modified_base 20: mod_base = OTHER; note = 2'-O-methyluridine with a 3'-phosphorothioate linkage
  modified_base 21: mod_base = OTHER; note = 2'-O-methyladenosine
aaagttcgagacttgcattta

SEQ ID NO: 405 - RNA, 21 nt, synthetic construct
  source 1..21: mol_type = other RNA
  modified_base 1: mod_base = OTHER; note = 2'-O-methyluridine with a 3'-phosphorothioate linkage
  modified_base 2: mod_base = OTHER; note = 2'-O-methyluridine with a 3'-phosphorothioate linkage
  modified_base 3: mod_base = cm
  modified_base 4: mod_base = gm
  modified_base 5: mod_base = OTHER; note = 2'-O-methyladenosine
  modified_base 6: mod_base = gm
  modified_base 7: mod_base = OTHER; note = 2'-O-methyladenosine
  modified_base 8: mod_base = cm
  modified_base 9: mod_base = OTHER; note = 2'-fluorouridine
  modified_base 10: mod_base = OTHER; note = 2'-fluorouridine
  modified_base 11: mod_base = OTHER; note = 2'-fluoroguanosine
  modified_base 12: mod_base = cm
  modified_base 13: mod_base = OTHER; note = 2'-O-methyladenosine
  modified_base 14: mod_base = um
  modified_base 15: mod_base = um
  modified_base 16: mod_base = um
  modified_base 17: mod_base = gm
  modified_base 18: mod_base = OTHER; note = 2'-O-methyladenosine
  modified_base 19: mod_base = OTHER; note = 2'-O-methyladenosine with a 3'-phosphorothioate linkage
  modified_base 20: mod_base = OTHER; note = 2'-O-methyladenosine with a 3'-phosphorothioate linkage
  modified_base 21: mod_base = OTHER; note = 2'-O-methyladenosine
ttcgagacttgcatttgaaaa

SEQ ID NO: 406 - RNA, 21 nt, synthetic construct
  source 1..21: mol_type = other RNA
  modified_base 1: mod_base = OTHER; note = 2'-O-methyladenosine with a 3'-phosphorothioate linkage
  modified_base 2: mod_base = OTHER; note = 2'-O-methylcytidine with a 3'-phosphorothioate linkage
  modified_base 3: mod_base = um
  modified_base 4: mod_base = cm
  modified_base 5: mod_base = cm
  modified_base 6: mod_base = OTHER; note = 2'-O-methyladenosine
  modified_base 7: mod_base = OTHER; note = 2'-O-methyladenosine
  modified_base 8: mod_base = gm
  modified_base 9: mod_base = OTHER; note = 2'-fluoroadenosine
  modified_base 10: mod_base = OTHER; note = 2'-fluoroadenosine
  modified_base 11: mod_base = OTHER; note = 2'-fluorouridine
  modified_base 12: mod_base = cm
  modified_base 13: mod_base = um
  modified_base 14: mod_base = um
  modified_base 15: mod_base = um
  modified_base 16: mod_base = um
  modified_base 17: mod_base = OTHER; note = 2'-O-methyladenosine
  modified_base 18: mod_base = um
  modified_base 19: mod_base = OTHER; note = 2'-O-methylcytidine with a 3'-phosphorothioate linkage
  modified_base 20: mod_base = OTHER; note = 2'-O-methyladenosine with a 3'-phosphorothioate linkage
  modified_base 21: mod_base = OTHER; note = 2'-O-methyladenosine
actccaagaatcttttatcaa

SEQ ID NO: 407 - RNA, 21 nt, synthetic construct
  source 1..21: mol_type = other RNA
  modified_base 1: mod_base = OTHER; note = 2'-O-methyladenosine with a 3'-phosphorothioate linkage
  modified_base 2: mod_base = OTHER; note = 2'-O-methyladenosine with a 3'-phosphorothioate linkage
  modified_base 3: mod_base = gm
  modified_base 4: mod_base = OTHER; note = 2'-O-methyladenosine
  modified_base 5: mod_base = cm
  modified_base 6: mod_base = gm
  modified_base 7: mod_base = gm
  modified_base 8: mod_base = um
  modified_base 9: mod_base = OTHER; note = 2'-fluoroguanosine
  modified_base 10: mod_base = OTHER; note = 2'-fluoroadenosine
  modified_base 11: mod_base = OTHER; note = 2'-fluoroadenosine
  modified_base 12: mod_base = gm
  modified_base 13: mod_base = OTHER; note = 2'-O-methyladenosine
  modified_base 14: mod_base = OTHER; note = 2'-O-methyladenosine
  modified_base 15: mod_base = um
  modified_base 16: mod_base = um
  modified_base 17: mod_base = OTHER; note = 2'-O-methyladenosine
  modified_base 18: mod_base = gm
  modified_base 19: mod_base = OTHER; note = 2'-O-methyladenosine with a 3'-phosphorothioate linkage
  modified_base 20: mod_base = OTHER; note = 2'-O-methyluridine with a 3'-phosphorothioate linkage
  modified_base 21: mod_base = OTHER; note = 2'-O-methyladenosine
aagacggtgaagaattagata

SEQ ID NO: 408 - RNA, 21 nt, synthetic construct
  source 1..21: mol_type = other RNA
  modified_base 1: mod_base = OTHER; note = 2'-O-methylguanosine with a 3'-phosphorothioate linkage
  modified_base 2: mod_base = OTHER; note = 2'-O-methyladenosine with a 3'-phosphorothioate linkage
  modified_base 3: mod_base = cm
  modified_base 4: mod_base = gm
  modified_base 5: mod_base = gm
  modified_base 6: mod_base = um
  modified_base 7: mod_base = gm
  modified_base 8: mod_base = OTHER; note = 2'-O-methyladenosine
  modified_base 9: mod_base = OTHER; note = 2'-fluoroadenosine
  modified_base 10: mod_base = OTHER; note = 2'-fluoroguanosine
  modified_base 11: mod_base = OTHER; note = 2'-fluoroadenosine
  modified_base 12: mod_base = OTHER; note = 2'-O-methyladenosine
  modified_base 13: mod_base = um
  modified_base 14: mod_base = um
  modified_base 15: mod_base = OTHER; note = 2'-O-methyladenosine
  modified_base 16: mod_base = gm
  modified_base 17: mod_base = OTHER; note = 2'-O-methyladenosine
  modified_base 18: mod_base = um
  modified_base 19: mod_base = OTHER; note = 2'-O-methyladenosine with a 3'-phosphorothioate linkage
  modified_base 20: mod_base = OTHER; note = 2'-O-methylcytidine with a 3'-phosphorothioate linkage
  modified_base 21: mod_base = OTHER; note = 2'-O-methyladenosine
gacggtgaagaattagataca

SEQ ID NO: 409 - RNA, 21 nt, synthetic construct
  source 1..21: mol_type = other RNA
  modified_base 1: mod_base = OTHER; note = 2'-O-methyladenosine with a 3'-phosphorothioate linkage
  modified_base 2: mod_base = OTHER; note = 2'-O-methyladenosine with a 3'-phosphorothioate linkage
  modified_base 3: mod_base = um
  modified_base 4: mod_base = gm
  modified_base 5: mod_base = gm
  modified_base 6: mod_base = OTHER; note = 2'-O-methyladenosine
  modified_base 7: mod_base = OTHER; note = 2'-O-methyladenosine
  modified_base 8: mod_base = OTHER; note = 2'-O-methyladenosine
  modified_base 9: mod_base = OTHER; note = 2'-fluoroadenosine
  modified_base 10: mod_base = OTHER; note = 2'-fluorocytidine
  modified_base 11: mod_base = OTHER; note = 2'-fluoroadenosine
  modified_base 12: mod_base = OTHER; note = 2'-O-methyladenosine
  modified_base 13: mod_base = um
  modified_base 14: mod_base = cm
  modified_base 15: mod_base = um
  modified_base 16: mod_base = OTHER; note = 2'-O-methyladenosine
  modified_base 17: mod_base = OTHER; note = 2'-O-methyladenosine
  modified_base 18: mod_base = OTHER; note = 2'-O-methyladenosine
  modified_base 19: mod_base = OTHER; note = 2'-O-methyluridine with a 3'-phosphorothioate linkage
  modified_base 20: mod_base = OTHER; note = 2'-O-methylcytidine with a 3'-phosphorothioate linkage
  modified_base 21: mod_base = OTHER; note = 2'-O-methyladenosine
aatggaaaacaatctaaatca

SEQ ID NO: 410 - RNA, 21 nt, synthetic construct
  source 1..21: mol_type = other RNA
  modified_base 1: mod_base = OTHER; note = 2'-O-methylguanosine with a 3'-phosphorothioate linkage
  modified_base 2: mod_base = OTHER; note = 2'-O-methylguanosine with a 3'-phosphorothioate linkage
  modified_base 3: mod_base = OTHER; note = 2'-O-methyladenosine
  modified_base 4: mod_base = OTHER; note = 2'-O-methyladenosine
  modified_base 5: mod_base = gm
  modified_base 6: mod_base = OTHER; note = 2'-O-methyladenosine
  modified_base 7: mod_base = OTHER; note = 2'-O-methyladenosine
  modified_base 8: mod_base = gm
  modified_base 9: mod_base = OTHER; note = 2'-fluoroadenosine
  modified_base 10: mod_base = OTHER; note = 2'-fluoroadenosine
  modified_base 11: mod_base = OTHER; note = 2'-fluoroadenosine
  modified_base 12: mod_base = OTHER; note = 2'-O-methyladenosine
  modified_base 13: mod_base = OTHER; note = 2'-O-methyladenosine
  modified_base 14: mod_base = um
  modified_base 15: mod_base = gm
  modified_base 16: mod_base = um
  modified_base 17: mod_base = OTHER; note = 2'-O-methyladenosine
  modified_base 18: mod_base = OTHER; note = 2'-O-methyladenosine
  modified_base 19: mod_base = OTHER; note = 2'-O-methyladenosine with a 3'-phosphorothioate linkage
  modified_base 20: mod_base = OTHER; note = 2'-O-methylguanosine with a 3'-phosphorothioate linkage
  modified_base 21: mod_base = OTHER; note = 2'-O-methyladenosine
ggaagaagaaaaatgtaaaga

SEQ ID NO: 411 - RNA, 21 nt, synthetic construct
  source 1..21: mol_type = other RNA
  modified_base 1: mod_base = OTHER; note = 2'-O-methylcytidine with a 3'-phosphorothioate linkage and a 5' inverted abasic moiety connected via a 5' to 5' phosphorothioate linkage
  modified_base 2: mod_base = um
  modified_base 3: mod_base = OTHER; note = 2'-O-methyladenosine
  modified_base 4: mod_base = um
  modified_base 5: mod_base = gm
  modified_base 6: mod_base = gm
  modified_base 7: mod_base = cm
  modified_base 8: mod_base = OTHER; note = 2'-O-methyladenosine
  modified_base 9: mod_base = OTHER; note = 2'-fluoroguanosine
  modified_base 10: mod_base = OTHER; note = 2'-fluorouridine
  modified_base 11: mod_base = OTHER; note = 2'-fluorouridine
  modified_base 12: mod_base = gm
  modified_base 13: mod_base = cm
  modified_base 14: mod_base = OTHER; note = 2'-O-methyladenosine
  modified_base 15: mod_base = OTHER; note = 2'-O-methyladenosine
  modified_base 16: mod_base = OTHER; note = 2'-O-methyladenosine
  modified_base 17: mod_base = OTHER; note = 2'-O-methyladenosine
  modified_base 18: mod_base = um
  modified_base 19: mod_base = OTHER; note = 2'-O-methyladenosine with a 3'-phosphorothioate linkage
  modified_base 20: mod_base = OTHER; note = 2'-O-methyluridine with a 3'-phosphorothioate linkage
  modified_base 21: mod_base = OTHER; note = 2'-O-methyladenosine
ctatggcagttgcaaaatata

SEQ ID NO: 412 - RNA, 21 nt, synthetic construct
  source 1..21: mol_type = other RNA
  modified_base 1: mod_base = OTHER; note = 2'-O-methyluridine with a 3'-phosphorothioate linkage and a 5' inverted abasic moiety connected via a 5' to 5' phosphorothioate linkage
  modified_base 2: mod_base = OTHER; note = 2'-O-methyladenosine
  modified_base 3: mod_base = um
  modified_base 4: mod_base = gm
  modified_base 5: mod_base = gm
  modified_base 6: mod_base = cm
  modified_base 7: mod_base = OTHER; note = 2'-O-methyladenosine
  modified_base 8: mod_base = gm
  modified_base 9: mod_base = OTHER; note = 2'-fluorouridine
  modified_base 10: mod_base = OTHER; note = 2'-fluorouridine
  modified_base 11: mod_base = OTHER; note = 2'-fluoroguanosine
  modified_base 12: mod_base = cm
  modified_base 13: mod_base = OTHER; note = 2'-O-methyladenosine
  modified_base 14: mod_base = OTHER; note = 2'-O-methyladenosine
  modified_base 15: mod_base = OTHER; note = 2'-O-methyladenosine
  modified_base 16: mod_base = OTHER; note = 2'-O-methyladenosine
  modified_base 17: mod_base = um
  modified_base 18: mod_base = OTHER; note = 2'-O-methyladenosine
  modified_base 19: mod_base = OTHER; note = 2'-O-methyluridine with a 3'-phosphorothioate linkage
  modified_base 20: mod_base = OTHER; note = 2'-O-methyluridine with a 3'-phosphorothioate linkage
  modified_base 21: mod_base = OTHER; note = 2'-O-methyladenosine
tatggcagttgcaaaatatta

SEQ ID NO: 413 - RNA, 21 nt, synthetic construct
  source 1..21: mol_type = other RNA
  modified_base 1: mod_base = OTHER; note = 2'-O-methyladenosine with a 3'-phosphorothioate linkage and a 5' inverted abasic moiety connected via a 5' to 5' phosphorothioate linkage
  modified_base 2: mod_base = um
  modified_base 3: mod_base = gm
  modified_base 4: mod_base = gm
  modified_base 5: mod_base = cm
  modified_base 6: mod_base = OTHER; note = 2'-O-methyladenosine
  modified_base 7: mod_base = gm
  modified_base 8: mod_base = um
  modified_base 9: mod_base = OTHER; note = 2'-fluorouridine
  modified_base 10: mod_base = OTHER; note = 2'-fluoroguanosine
  modified_base 11: mod_base = OTHER; note = 2'-fluorocytidine
  modified_base 12: mod_base = OTHER; note = 2'-O-methyladenosine
  modified_base 13: mod_base = OTHER; note = 2'-O-methyladenosine
  modified_base 14: mod_base = OTHER; note = 2'-O-methyladenosine
  modified_base 15: mod_base = OTHER; note = 2'-O-methyladenosine
  modified_base 16: mod_base = um
  modified_base 17: mod_base = OTHER; note = 2'-O-methyladenosine
  modified_base 18: mod_base = um
  modified_base 19: mod_base = OTHER; note = 2'-O-methyluridine with a 3'-phosphorothioate linkage
  modified_base 20: mod_base = OTHER; note = 2'-O-methylcytidine with a 3'-phosphorothioate linkage
  modified_base 21: mod_base = OTHER; note = 2'-O-methyladenosine
atggcagttgcaaaatattca

SEQ ID NO: 414 - RNA, 21 nt, synthetic construct
  source 1..21: mol_type = other RNA
  modified_base 1: mod_base = OTHER; note = 2'-O-methylguanosine with a 3'-phosphorothioate linkage and a 5' inverted abasic moiety connected via a 5' to 5' phosphorothioate linkage
  modified_base 2: mod_base = gm
  modified_base 3: mod_base = cm
  modified_base 4: mod_base = OTHER; note = 2'-O-methyladenosine
  modified_base 5: mod_base = gm
  modified_base 6: mod_base = um
  modified_base 7: mod_base = um
  modified_base 8: mod_base = gm
  modified_base 9: mod_base = OTHER; note = 2'-fluorocytidine
  modified_base 10: mod_base = OTHER; note = 2'-fluoroadenosine
  modified_base 11: mod_base = OTHER; note = 2'-fluoroadenosine
  modified_base 12: mod_base = OTHER; note = 2'-O-methyladenosine
  modified_base 13: mod_base = OTHER; note = 2'-O-methyladenosine
  modified_base 14: mod_base = um
  modified_base 15: mod_base = OTHER; note = 2'-O-methyladenosine
  modified_base 16: mod_base = um
  modified_base 17: mod_base = um
  modified_base 18: mod_base = cm
  modified_base 19: mod_base = OTHER; note = 2'-O-methyladenosine with a 3'-phosphorothioate linkage
  modified_base 20: mod_base = OTHER; note = 2'-O-methylguanosine with a 3'-phosphorothioate linkage
  modified_base 21: mod_base = OTHER; note = 2'-O-methyladenosine
ggcagttgcaaaatattcaga

SEQ ID NO: 415 - RNA, 21 nt, synthetic construct
  source 1..21: mol_type = other RNA
  modified_base 1: mod_base = OTHER; note = 2'-O-methylguanosine with a 3'-phosphorothioate linkage and a 5' inverted abasic moiety connected via a 5' to 5' phosphorothioate linkage
  modified_base 2: mod_base = cm
  modified_base 3: mod_base = OTHER; note = 2'-O-methyladenosine
  modified_base 4: mod_base = gm
  modified_base 5: mod_base = um
  modified_base 6: mod_base = um
  modified_base 7: mod_base = gm
  modified_base 8: mod_base = cm
  modified_base 9: mod_base = OTHER; note = 2'-fluoroadenosine
  modified_base 10: mod_base = OTHER; note = 2'-fluoroadenosine
  modified_base 11: mod_base = OTHER; note = 2'-fluoroadenosine
  modified_base 12: mod_base = OTHER; note = 2'-O-methyladenosine
  modified_base 13: mod_base = um
  modified_base 14: mod_base = OTHER; note = 2'-O-methyladenosine
  modified_base 15: mod_base = um
  modified_base 16: mod_base = um
  modified_base 17: mod_base = cm
  modified_base 18: mod_base = OTHER; note = 2'-O-methyladenosine
  modified_base 19: mod_base = OTHER; note = 2'-O-methylguanosine with a 3'-phosphorothioate linkage
  modified_base 20: mod_base = OTHER; note = 2'-O-methylguanosine with a 3'-phosphorothioate linkage
  modified_base 21: mod_base = OTHER; note = 2'-O-methyladenosine
gcagttgcaaaatattcagga

SEQ ID NO: 416 - RNA, 21 nt, synthetic construct
  source 1..21: mol_type = other RNA
  modified_base 1: mod_base = OTHER; note = 2'-O-methylcytidine with a 3'-phosphorothioate linkage and a 5' inverted abasic moiety connected via a 5' to 5' phosphorothioate linkage
  modified_base 2: mod_base = OTHER; note = 2'-O-methyladenosine
  modified_base 3: mod_base = OTHER; note = 2'-O-methyladenosine
  modified_base 4: mod_base = um
  modified_base 5: mod_base = gm
  modified_base 6: mod_base = gm
  modified_base 7: mod_base = um
  modified_base 8: mod_base = OTHER; note = 2'-O-methyladenosine
  modified_base 9: mod_base = OTHER; note = 2'-fluorouridine
  modified_base 10: mod_base = OTHER; note = 2'-fluoroadenosine
  modified_base 11: mod_base = OTHER; note = 2'-fluoroadenosine
  modified_base 12: mod_base = gm
  modified_base 13: mod_base = cm
  modified_base 14: mod_base = cm
  modified_base 15: mod_base = um
  modified_base 16: mod_base = cm
  modified_base 17: mod_base = OTHER; note = 2'-O-methyladenosine
  modified_base 18: mod_base = um
  modified_base 19: mod_base = OTHER; note = 2'-O-methyluridine with a 3'-phosphorothioate linkage
  modified_base 20: mod_base = OTHER; note = 2'-O-methyladenosine with a 3'-phosphorothioate linkage
  modified_base 21: mod_base = OTHER; note = 2'-O-methyladenosine
caatggtataagcctcattaa

SEQ ID NO: 417 - RNA, 21 nt, synthetic construct
  source 1..21: mol_type = other RNA
  modified_base 1: mod_base = OTHER; note = 2'-O-methyladenosine with a 3'-phosphorothioate linkage and a 5' inverted abasic moiety connected via a 5' to 5' phosphorothioate linkage
  modified_base 2: mod_base = um
  modified_base 3: mod_base = gm
  modified_base 4: mod_base = gm
  modified_base 5: mod_base = um
  modified_base 6: mod_base = OTHER; note = 2'-O-methyladenosine
  modified_base 7: mod_base = um
  modified_base 8: mod_base = OTHER; note = 2'-O-methyladenosine
  modified_base 9: mod_base = OTHER; note = 2'-fluoroadenosine
  modified_base 10: mod_base = OTHER; note = 2'-fluoroguanosine
  modified_base 11: mod_base = OTHER; note = 2'-fluorocytidine
  modified_base 12: mod_base = cm
  modified_base 13: mod_base = um
  modified_base 14: mod_base = cm
  modified_base 15: mod_base = OTHER; note = 2'-O-methyladenosine
  modified_base 16: mod_base = um
  modified_base 17: mod_base = um
  modified_base 18: mod_base = OTHER; note = 2'-O-methyladenosine
  modified_base 19: mod_base = OTHER; note = 2'-O-methyluridine with a 3'-phosphorothioate linkage
  modified_base 20: mod_base = OTHER; note = 2'-O-methylcytidine with a 3'-phosphorothioate linkage
  modified_base 21: mod_base = OTHER; note = 2'-O-methyladenosine
atggtataagcctcattatca

SEQ ID NO: 418 - RNA, 21 nt, synthetic construct
  source 1..21: mol_type = other RNA
  modified_base 1: mod_base = OTHER; note = 2'-O-methylguanosine with a 3'-phosphorothioate linkage and a 5' inverted abasic moiety connected via a 5' to 5' phosphorothioate linkage
  modified_base 2: mod_base = um
  modified_base 3: mod_base = OTHER; note = 2'-O-methyladenosine
  modified_base 4: mod_base = um
  modified_base 5: mod_base = OTHER; note = 2'-O-methyladenosine
  modified_base 6: mod_base = OTHER; note = 2'-O-methyladenosine
  modified_base 7: mod_base = gm
  modified_base 8: mod_base = cm
  modified_base 9: mod_base = OTHER; note = 2'-fluorocytidine
  modified_base 10: mod_base = OTHER; note = 2'-fluorouridine
  modified_base 11: mod_base = OTHER; note = 2'-fluorocytidine
  modified_base 12: mod_base = OTHER; note = 2'-O-methyladenosine
  modified_base 13: mod_base = um
  modified_base 14: mod_base = um
  modified_base 15: mod_base = OTHER; note = 2'-O-methyladenosine
  modified_base 16: mod_base = um
  modified_base 17: mod_base = cm
  modified_base 18: mod_base = OTHER; note = 2'-O-methyladenosine
  modified_base 19: mod_base = OTHER; note = 2'-O-methyladenosine with a 3'-phosphorothioate linkage
  modified_base 20: mod_base = OTHER; note = 2'-O-methyladenosine with a 3'-phosphorothioate linkage
  modified_base 21: mod_base = OTHER; note = 2'-O-methyladenosine
gtataagcctcattatcaaaa

SEQ ID NO: 419 - RNA, 21 nt, synthetic construct
  source 1..21: mol_type = other RNA
  modified_base 1: mod_base = OTHER; note = 2'-O-methyluridine with a 3'-phosphorothioate linkage and a 5' inverted abasic moiety connected via a 5' to 5' phosphorothioate linkage
  modified_base 2: mod_base = OTHER; note = 2'-O-methyladenosine
  modified_base 3: mod_base = um
  modified_base 4: mod_base = OTHER; note = 2'-O-methyladenosine
  modified_base 5: mod_base = OTHER; note = 2'-O-methyladenosine
  modified_base 6: mod_base = gm
  modified_base 7: mod_base = cm
  modified_base 8: mod_base = cm
  modified_base 9: mod_base = OTHER; note = 2'-fluorouridine
  modified_base 10: mod_base = OTHER; note = 2'-fluorocytidine
  modified_base 11: mod_base = OTHER; note = 2'-fluoroadenosine
  modified_base 12: mod_base = um
  modified_base 13: mod_base = um
  modified_base 14: mod_base = OTHER; note = 2'-O-methyladenosine
  modified_base 15: mod_base = um
  modified_base 16: mod_base = cm
  modified_base 17: mod_base = OTHER; note = 2'-O-methyladenosine
  modified_base 18: mod_base = OTHER; note = 2'-O-methyladenosine
  modified_base 19: mod_base = OTHER; note = 2'-O-methyladenosine with a 3'-phosphorothioate linkage
  modified_base 20: mod_base = OTHER; note = 2'-O-methyladenosine with a 3'-phosphorothioate linkage
  modified_base 21: mod_base = OTHER; note = 2'-O-methyladenosine
tataagcctcattatcaaaaa

SEQ ID NO: 420 - RNA, 21 nt, synthetic construct
  source 1..21: mol_type = other RNA
  modified_base 1: mod_base = OTHER; note = 2'-O-methyladenosine with a 3'-phosphorothioate linkage and a 5' inverted abasic moiety connected via a 5' to 5' phosphorothioate linkage
  modified_base 2: mod_base = OTHER; note = 2'-O-methyladenosine
  modified_base 3: mod_base = gm
  modified_base 4: mod_base = gm
  modified_base 5: mod_base = gm
  modified_base 6: mod_base = OTHER; note = 2'-O-methyladenosine
  modified_base 7: mod_base = cm
  modified_base 8: mod_base = um
  modified_base 9: mod_base = OTHER; note = 2'-fluoroadenosine
  modified_base 10: mod_base = OTHER; note = 2'-fluoroadenosine
  modified_base 11: mod_base = OTHER; note = 2'-fluoroadenosine
  modified_base 12: mod_base = um
  modified_base 13: mod_base = OTHER; note = 2'-O-methyladenosine
  modified_base 14: mod_base = gm
  modified_base 15: mod_base = gm
  modified_base 16: mod_base = OTHER; note = 2'-O-methyladenosine
  modified_base 17: mod_base = OTHER; note = 2'-O-methyladenosine
  modified_base 18: mod_base = um
  modified_base 19: mod_base = OTHER; note = 2'-O-methyladenosine with a 3'-phosphorothioate linkage
  modified_base 20: mod_base = OTHER; note = 2'-O-methylguanosine with a 3'-phosphorothioate linkage
  modified_base 21: mod_base = OTHER; note = 2'-O-methyladenosine
aagggactaaataggaataga

SEQ ID NO: 421 - RNA, 21 nt, synthetic construct
  source 1..21: mol_type = other RNA
  modified_base 1: mod_base = OTHER; note = 2'-O-methylguanosine with a 3'-phosphorothioate linkage and a 5' inverted abasic moiety connected via a 5' to 5' phosphorothioate linkage
  modified_base 2: mod_base = gm
  modified_base 3: mod_base = gm
  modified_base 4: mod_base = OTHER; note = 2'-O-methyladenosine
  modified_base 5: mod_base = cm
  modified_base 6: mod_base = um
  modified_base 7: mod_base = OTHER; note = 2'-O-methyladenosine
  modified_base 8: mod_base = OTHER; note = 2'-O-methyladenosine
  modified_base 9: mod_base = OTHER; note = 2'-fluoroadenosine
  modified_base 10: mod_base = OTHER; note = 2'-fluorouridine
  modified_base 11: mod_base = OTHER; note = 2'-fluoroadenosine
  modified_base 12: mod_base = gm
  modified_base 13: mod_base = gm
  modified_base 14: mod_base = OTHER; note = 2'-O-methyladenosine
  modified_base 15: mod_base = OTHER; note = 2'-O-methyladenosine
  modified_base 16: mod_base = um
  modified_base 17: mod_base = OTHER; note = 2'-O-methyladenosine
  modified_base 18: mod_base = gm
  modified_base 19: mod_base = OTHER; note = 2'-O-methyluridine with a 3'-phosphorothioate linkage
  modified_base 20: mod_base = OTHER; note = 2'-O-methyluridine with a 3'-phosphorothioate linkage
  modified_base 21: mod_base = OTHER; note = 2'-O-methyladenosine
gggactaaataggaatagtta

SEQ ID NO: 422 - RNA, 21 nt, synthetic construct
  source 1..21: mol_type = other RNA
  modified_base 1: mod_base = OTHER; note = 2'-O-methyladenosine with a 3'-phosphorothioate linkage and a 5' inverted abasic moiety connected via a 5' to 5' phosphorothioate linkage
  modified_base 2: mod_base = OTHER; note = 2'-O-methyladenosine
  modified_base 3: mod_base = OTHER; note = 2'-O-methyladenosine
  modified_base 4: mod_base = gm
  modified_base 5: mod_base = gm
  modified_base 6: mod_base = um
  modified_base 7: mod_base = cm
  modified_base 8: mod_base = OTHER; note = 2'-O-methyladenosine
  modified_base 9: mod_base = OTHER; note = 2'-fluorouridine
  modified_base 10: mod_base = OTHER; note = 2'-fluorocytidine
  modified_base 11: mod_base = OTHER; note = 2'-fluorouridine
  modified_base 12: mod_base = um
  modified_base 13: mod_base = cm
  modified_base 14: mod_base = um
  modified_base 15: mod_base = gm
  modified_base 16: mod_base = um
  modified_base 17: mod_base = OTHER; note = 2'-O-methyladenosine
  modified_base 18: mod_base = um
  modified_base 19: mod_base = OTHER; note = 2'-O-methylcytidine with a 3'-phosphorothioate linkage
  modified_base 20: mod_base = OTHER; note = 2'-O-methyladenosine with a 3'-phosphorothioate linkage
  modified_base 21: mod_base = OTHER; note = 2'-O-methyladenosine
aaaggtcatcttctgtatcaa

SEQ ID NO: 423 - RNA, 21 nt, synthetic construct
  source 1..21: mol_type = other RNA
  modified_base 1: mod_base = OTHER; note = 2'-O-methyluridine with a 3'-phosphorothioate linkage and a 5' inverted abasic moiety connected via a 5' to 5' phosphorothioate linkage
  modified_base 2: mod_base = um
  modified_base 3: mod_base = cm
  modified_base 4: mod_base = cm
  modified_base 5: mod_base = um
  modified_base 6: mod_base = gm
  modified_base 7: mod_base = OTHER; note = 2'-O-methyladenosine
  modified_base 8: mod_base = um
  modified_base 9: mod_base = OTHER; note = 2'-fluoroadenosine
  modified_base 10: mod_base = OTHER; note = 2'-fluorocytidine
  modified_base 11: mod_base = OTHER; note = 2'-fluorouridine
  modified_base 12: mod_base = gm
  modified_base 13: mod_base = cm
  modified_base 14: mod_base = um
  modified_base 15: mod_base = gm
  modified_base 16: mod_base = OTHER; note = 2'-O-methyladenosine
  modified_base 17: mod_base = um
  modified_base 18: mod_base = um
  modified_base 19: mod_base = OTHER; note = 2'-O-methyluridine with a 3'-phosphorothioate linkage
  modified_base 20: mod_base = OTHER; note = 2'-O-methyluridine with a 3'-phosphorothioate linkage
  modified_base 21: mod_base = OTHER; note = 2'-O-methyladenosine
ttcctgatactgctgatttta

SEQ ID NO: 424 - RNA, 21 nt, synthetic construct
  source 1..21: mol_type = other RNA
  modified_base 1: mod_base = OTHER; note = 2'-O-methyluridine with a 3'-phosphorothioate linkage and a 5' inverted abasic moiety connected via a 5' to 5' phosphorothioate linkage
  modified_base 2: mod_base = gm
  modified_base 3: mod_base = OTHER; note = 2'-O-methyladenosine
  modified_base 4: mod_base = OTHER; note = 2'-O-methyladenosine
  modified_base 5: mod_base = gm
  modified_base 6: mod_base = OTHER; note = 2'-O-methyladenosine
  modified_base 7: mod_base = OTHER; note = 2'-O-methyladenosine
  modified_base 8: mod_base = gm
  modified_base 9: mod_base = OTHER; note = 2'-fluoroadenosine
  modified_base 10: mod_base = OTHER; note = 2'-fluoroadenosine
  modified_base 11: mod_base = OTHER; note = 2'-fluoroadenosine
  modified_base 12: mod_base = OTHER; note = 2'-O-methyladenosine
  modified_base 13: mod_base = cm
  modified_base 14: mod_base = OTHER; note = 2'-O-methyladenosine
  modified_base 15: mod_base = um
  modified_base 16: mod_base = um
  modified_base 17: mod_base = um
  modified_base 18: mod_base = um
  modified_base 19: mod_base = OTHER; note = 2'-O-methylcytidine with a 3'-phosphorothioate linkage
  modified_base 20: mod_base = OTHER; note = 2'-O-methyluridine with a 3'-phosphorothioate linkage
  modified_base 21: mod_base = OTHER; note = 2'-O-methyladenosine
tgaagaagaaaacattttcta

SEQ ID NO: 425 - RNA, 21 nt, synthetic construct
  source 1..21: mol_type = other RNA
  modified_base 1: mod_base = OTHER; note = 2'-O-methyluridine with a 3'-phosphorothioate linkage and a 5' inverted abasic moiety connected via a 5' to 5' phosphorothioate linkage
  modified_base 2: mod_base = cm
  modified_base 3: mod_base = um
  modified_base 4: mod_base = cm
  modified_base 5: mod_base = gm
  modified_base 6: mod_base = OTHER; note = 2'-O-methyladenosine
  modified_base 7: mod_base = OTHER; note = 2'-O-methyladenosine
  modified_base 8: mod_base = OTHER; note = 2'-O-methyladenosine
  modified_base 9: mod_base = OTHER; note = 2'-fluoroguanosine
  modified_base 10: mod_base = OTHER; note = 2'-fluoroadenosine
  modified_base 11: mod_base = OTHER; note = 2'-fluoroadenosine
  modified_base 12: mod_base = um
  modified_base 13: mod_base = cm
  modified_base 14: mod_base = OTHER; note = 2'-O-methyladenosine
  modified_base 15: mod_base = um
  modified_base 16: mod_base = um
  modified_base 17: mod_base = cm
  modified_base 18: mod_base = OTHER; note = 2'-O-methyladenosine
  modified_base 19: mod_base = OTHER; note = 2'-O-methyladenosine with a 3'-phosphorothioate linkage
  modified_base 20: mod_base = OTHER; note = 2'-O-methyladenosine with a 3'-phosphorothioate linkage
  modified_base 21: mod_base = OTHER; note = 2'-O-methyladenosine
tctcgaaagaatcattcaaaa

SEQ ID NO: 426 - RNA, 21 nt, synthetic construct
  source 1..21: mol_type = other RNA
  modified_base 1: mod_base = OTHER; note = 2'-O-methylcytidine with a 3'-phosphorothioate linkage and a 5' inverted abasic moiety connected via a 5' to 5' phosphorothioate linkage
  modified_base 2: mod_base = um
  modified_base 3: mod_base = cm
  modified_base 4: mod_base = gm
  modified_base 5: mod_base = OTHER; note = 2'-O-methyladenosine
  modified_base 6: mod_base = OTHER; note = 2'-O-methyladenosine
  modified_base 7: mod_base = OTHER; note = 2'-O-methyladenosine
  modified_base 8: mod_base = gm
  modified_base 9: mod_base = OTHER; note = 2'-fluoroadenosine
  modified_base 10: mod_base = OTHER; note = 2'-fluoroadenosine
  modified_base 11: mod_base = OTHER; note = 2'-fluorouridine
  modified_base 12: mod_base = cm
  modified_base 13: mod_base = OTHER; note = 2'-O-methyladenosine
  modified_base 14: mod_base = um
  modified_base 15: mod_base = um
  modified_base 16: mod_base = cm
  modified_base 17: mod_base = OTHER; note = 2'-O-methyladenosine
  modified_base 18: mod_base = OTHER; note = 2'-O-methyladenosine
  modified_base 19: mod_base = OTHER; note = 2'-O-methyladenosine with a 3'-phosphorothioate linkage
  modified_base 20: mod_base = OTHER; note = 2'-O-methylcytidine with a 3'-phosphorothioate linkage
  modified_base 21: mod_base = OTHER; note = 2'-O-methyladenosine
ctcgaaagaatcattcaaaca

SEQ ID NO: 427 - RNA, 21 nt, synthetic construct
  source 1..21: mol_type = other RNA
  modified_base 1: mod_base = OTHER; note = 2'-O-methyluridine with a 3'-phosphorothioate linkage and a 5' inverted abasic moiety connected via a 5' to 5' phosphorothioate linkage
  modified_base 2: mod_base = cm
  modified_base 3: mod_base = gm
  modified_base 4: mod_base = OTHER; note = 2'-O-methyladenosine
  modified_base 5: mod_base = OTHER; note = 2'-O-methyladenosine
  modified_base 6: mod_base = OTHER; note = 2'-O-methyladenosine
  modified_base 7: mod_base = gm
  modified_base 8: mod_base = OTHER; note = 2'-O-methyladenosine
  modified_base 9: mod_base = OTHER; note = 2'-fluoroadenosine
  modified_base 10: mod_base = OTHER; note = 2'-fluorouridine
  modified_base 11: mod_base = OTHER; note = 2'-fluorocytidine
  modified_base 12: mod_base = OTHER; note = 2'-O-methyladenosine
  modified_base 13: mod_base = um
  modified_base 14: mod_base = um
  modified_base 15: mod_base = cm
  modified_base 16: mod_base = OTHER; note = 2'-O-methyladenosine
  modified_base 17: mod_base = OTHER; note = 2'-O-methyladenosine
  modified_base 18: mod_base = OTHER; note = 2'-O-methyladenosine
  modified_base 19: mod_base = OTHER; note = 2'-O-methylcytidine with a 3'-phosphorothioate linkage
  modified_base 20: mod_base = OTHER; note = 2'-O-methyluridine with a 3'-phosphorothioate linkage
  modified_base 21: mod_base = OTHER; note = 2'-O-methyladenosine
tcgaaagaatcattcaaacta

SEQ ID NO: 428 - RNA, 21 nt, synthetic construct
  source 1..21: mol_type = other RNA
  modified_base 1: mod_base = OTHER; note = 2'-O-methyluridine with a 3'-phosphorothioate linkage and a 5' inverted abasic moiety connected via a 5' to 5' phosphorothioate linkage
  modified_base 2: mod_base = OTHER; note = 2'-O-methyladenosine
  modified_base 3: mod_base = gm
  modified_base 4: mod_base = OTHER; note = 2'-O-methyladenosine
  modified_base 5: mod_base = OTHER; note = 2'-O-methyladenosine
  modified_base 6: mod_base = gm
  modified_base 7: mod_base = OTHER; note = 2'-O-methyladenosine
  modified_base 8: mod_base = gm
  modified_base 9: mod_base = OTHER; note = 2'-fluorouridine
  modified_base 10: mod_base = OTHER; note = 2'-fluoroadenosine
  modified_base 11: mod_base = OTHER; note = 2'-fluorouridine
  modified_base 12: mod_base = gm
  modified_base 13: mod_base = OTHER; note = 2'-O-methyladenosine
  modified_base 14: mod_base = cm
  modified_base 15: mod_base = um
  modified_base 16: mod_base = cm
  modified_base 17: mod_base = OTHER; note = 2'-O-methyladenosine
  modified_base 18: mod_base = um
  modified_base 19: mod_base = OTHER; note = 2'-O-methyluridine with a 3'-phosphorothioate linkage
  modified_base 20: mod_base = OTHER; note = 2'-O-methyladenosine with a 3'-phosphorothioate linkage
  modified_base 21: mod_base = OTHER; note = 2'-O-methyladenosine
tagaagagtatgactcattaa

SEQ ID NO: 429 - RNA, 21 nt, synthetic construct
  source 1..21: mol_type = other RNA
  modified_base 1: mod_base = OTHER; note = 2'-O-methyladenosine with a 3'-phosphorothioate linkage and a 5' inverted abasic moiety connected via a 5' to 5' phosphorothioate linkage
  modified_base 2: mod_base = gm
  modified_base 3: mod_base = OTHER; note = 2'-O-methyladenosine
  modified_base 4: mod_base = gm
  modified_base 5: mod_base = um
  modified_base 6: mod_base = OTHER; note = 2'-O-methyladenosine
  modified_base 7: mod_base = um
  modified_base 8: mod_base = gm
  modified_base 9: mod_base = OTHER; note = 2'-fluoroadenosine
  modified_base 10: mod_base = OTHER; note = 2'-fluorocytidine
  modified_base 11: mod_base = OTHER; note = 2'-fluorouridine
  modified_base 12: mod_base = cm
  modified_base 13: mod_base = OTHER; note = 2'-O-methyladenosine
  modified_base 14: mod_base = um
  modified_base 15: mod_base = um
  modified_base 16: mod_base = OTHER; note = 2'-O-methyladenosine
  modified_base 17: mod_base = OTHER; note = 2'-O-methyladenosine
  modified_base 18: mod_base = um
  modified_base 19: mod_base = OTHER; note = 2'-O-methyladenosine with a 3'-phosphorothioate linkage
  modified_base 20: mod_base = OTHER; note = 2'-O-methylguanosine with a 3'-phosphorothioate linkage
  modified_base 21: mod_base = OTHER; note = 2'-O-methyladenosine
agagtatgactcattaataga

SEQ ID NO: 430 - RNA, 21 nt, synthetic construct
  source 1..21: mol_type = other RNA
  modified_base 1: mod_base = OTHER; note = 2'-O-methyluridine with a 3'-phosphorothioate linkage and a 5' inverted abasic moiety connected via a 5' to 5' phosphorothioate linkage
  modified_base 2: mod_base = um
  modified_base 3: mod_base = gm
  modified_base 4: mod_base = cm
  modified_base 5: mod_base = um
  modified_base 6: mod_base = um
  modified_base 7: mod_base = OTHER; note = 2'-O-methyladenosine
  modified_base 8: mod_base = um
  modified_base 9: mod_base = OTHER; note = 2'-fluoroadenosine
  modified_base 10: mod_base = OTHER; note = 2'-fluorouridine
  modified_base 11: mod_base = OTHER; note = 2'-fluorouridine
  modified_base 12: mod_base = um
  modified_base 13: mod_base = cm
  modified_base 14: mod_base = um
  modified_base 15: mod_base = um
  modified_base 16: mod_base = cm
  modified_base 17: mod_base = gm
  modified_base 18: mod_base = OTHER; note = 2'-O-methyladenosine
  modified_base 19: mod_base = OTHER; note = 2'-O-methyladenosine with a 3'-phosphorothioate linkage
  modified_base 20: mod_base = OTHER; note = 2'-O-methylguanosine with a 3'-phosphorothioate linkage
  modified_base 21: mod_base = OTHER; note = 2'-O-methyladenosine
ttgcttatatttcttcgaaga

SEQ ID NO: 431 - RNA, 21 nt, synthetic construct
  source 1..21: mol_type = other RNA
  modified_base 1: mod_base = OTHER; note = 2'-O-methyluridine with a 3'-phosphorothioate linkage and a 5' inverted abasic moiety connected via a 5' to 5' phosphorothioate linkage
  modified_base 2: mod_base = cm
  modified_base 3: mod_base = cm
  modified_base 4: mod_base = um
  modified_base 5: mod_base = um
  modified_base 6: mod_base = cm
  modified_base 7: mod_base = um
  modified_base 8: mod_base = um
  modified_base 9: mod_base = OTHER; note = 2'-fluorocytidine
  modified_base 10: mod_base = OTHER; note = 2'-fluoroadenosine
  modified_base 11: mod_base = OTHER; note = 2'-fluorouridine
  modified_base 12: mod_base = cm
  modified_base 13: mod_base = um
  modified_base 14: mod_base = um
  modified_base 15: mod_base = gm
  modified_base 16: mod_base = OTHER; note = 2'-O-methyladenosine
  modified_base 17: mod_base = um
  modified_base 18: mod_base = cm
  modified_base 19: mod_base = OTHER; note = 2'-O-methyladenosine with a 3'-phosphorothioate linkage
  modified_base 20: mod_base = OTHER; note = 2'-O-methyluridine with a 3'-phosphorothioate linkage
  modified_base 21: mod_base = OTHER; note = 2'-O-methyladenosine
tccttcttcatcttgatcata

SEQ ID NO: 432 - RNA, 21 nt, synthetic construct
  source 1..21: mol_type = other RNA
  modified_base 1: mod_base = OTHER; note = 2'-O-methyladenosine with a 3'-phosphorothioate linkage and a 5' inverted abasic moiety connected via a 5' to 5' phosphorothioate linkage
  modified_base 2: mod_base = OTHER; note = 2'-O-methyladenosine
  modified_base 3: mod_base = OTHER; note = 2'-O-methyladenosine
  modified_base 4: mod_base = OTHER; note = 2'-O-methyladenosine
  modified_base 5: mod_base = gm
  modified_base 6: mod_base = um
  modified_base 7: mod_base = um
  modified_base 8: mod_base = cm
  modified_base 9: mod_base = OTHER; note = 2'-fluoroguanosine
  modified_base 10: mod_base = OTHER; note = 2'-fluoroadenosine
  modified_base 11: mod_base = OTHER; note = 2'-fluoroguanosine
  modified_base 12: mod_base = OTHER; note = 2'-O-methyladenosine
  modified_base 13: mod_base = cm
  modified_base 14: mod_base = um
  modified_base 15: mod_base = um
  modified_base 16: mod_base = gm
  modified_base 17: mod_base = cm
  modified_base 18: mod_base = OTHER; note = 2'-O-methyladenosine
  modified_base 19: mod_base = OTHER; note = 2'-O-methyluridine with a 3'-phosphorothioate linkage
  modified_base 20: mod_base = OTHER; note = 2'-O-methyluridine with a 3'-phosphorothioate linkage
  modified_base 21: mod_base = OTHER; note = 2'-O-methyladenosine
aaaagttcgagacttgcatta

SEQ ID NO: 433 - RNA, 21 nt, synthetic construct
  source 1..21: mol_type = other RNA
  modified_base 1: mod_base = OTHER; note = 2'-O-methyladenosine with a 3'-phosphorothioate linkage and a 5' inverted abasic moiety connected via a 5' to 5' phosphorothioate linkage
  modified_base 2: mod_base = OTHER; note = 2'-O-methyladenosine
  modified_base 3: mod_base = OTHER; note = 2'-O-methyladenosine
  modified_base 4: mod_base = gm
  modified_base 5: mod_base = um
  modified_base 6: mod_base = um
  modified_base 7: mod_base = cm
  modified_base 8: mod_base = gm
  modified_base 9: mod_base = OTHER; note = 2'-fluoroadenosine
  modified_base 10: mod_base = OTHER; note = 2'-fluoroguanosine
  modified_base 11: mod_base = OTHER; note = 2'-fluoroadenosine
  modified_base 12: mod_base = cm
  modified_base 13: mod_base = um
  modified_base 14: mod_base = um
  modified_base 15: mod_base = gm
  modified_base 16: mod_base = cm
  modified_base 17: mod_base = OTHER; note = 2'-O-methyladenosine
  modified_base 18: mod_base = um
  modified_base 19: mod_base = OTHER; note = 2'-O-methyluridine with a 3'-phosphorothioate linkage
  modified_base 20: mod_base = OTHER; note = 2'-O-methyluridine with a 3'-phosphorothioate linkage
  modified_base 21: mod_base = OTHER; note = 2'-O-methyladenosine
aaagttcgagacttgcattta

SEQ ID NO: 434 - RNA, 21 nt, synthetic construct
  source 1..21: mol_type = other RNA
  modified_base 1: mod_base = OTHER; note = 2'-O-methyluridine with a 3'-phosphorothioate linkage and a 5' inverted abasic moiety connected via a 5' to 5' phosphorothioate linkage
  modified_base 2: mod_base = um
  modified_base 3: mod_base = cm
  modified_base 4: mod_base = gm
  modified_base 5: mod_base = OTHER; note = 2'-O-methyladenosine
  modified_base 6: mod_base = gm
  modified_base 7: mod_base = OTHER; note = 2'-O-methyladenosine
  modified_base 8: mod_base = cm
  modified_base 9: mod_base = OTHER; note = 2'-fluorouridine
  modified_base 10: mod_base = OTHER; note = 2'-fluorouridine
  modified_base 11: mod_base = OTHER; note = 2'-fluoroguanosine
  modified_base 12: mod_base = cm
  modified_base 13: mod_base = OTHER; note = 2'-O-methyladenosine
  modified_base 14: mod_base = um
  modified_base 15: mod_base = um
  modified_base 16: mod_base = um
  modified_base 17: mod_base = gm
  modified_base 18: mod_base = OTHER; note = 2'-O-methyladenosine
  modified_base 19: mod_base = OTHER; note = 2'-O-methyladenosine with a 3'-phosphorothioate linkage
  modified_base 20: mod_base = OTHER; note = 2'-O-methyladenosine with a 3'-phosphorothioate linkage
  modified_base 21: mod_base = OTHER; note = 2'-O-methyladenosine
ttcgagacttgcatttgaaaa

SEQ ID NO: 435 - RNA, 21 nt, synthetic construct
  source 1..21: mol_type = other RNA
  modified_base 1: mod_base = OTHER; note = 2'-O-methyladenosine with a 3'-phosphorothioate linkage and a 5' inverted abasic moiety connected via a 5' to 5' phosphorothioate linkage
  modified_base 2: mod_base = cm
  modified_base 3: mod_base = um
  modified_base 4: mod_base = cm
  modified_base 5: mod_base = cm
  modified_base 6: mod_base = OTHER; note = 2'-O-methyladenosine
  modified_base 7: mod_base = OTHER; note = 2'-O-methyladenosine
  modified_base 8: mod_base = gm
  modified_base 9: mod_base = OTHER; note = 2'-fluoroadenosine
  modified_base 10: mod_base = OTHER; note = 2'-fluoroadenosine
  modified_base 11: mod_base = OTHER; note = 2'-fluorouridine
  modified_base 12: mod_base = cm
  modified_base 13: mod_base = um
  modified_base 14: mod_base = um
  modified_base 15: mod_base = um
  modified_base 16: mod_base = um
  modified_base 17: mod_base = OTHER; note = 2'-O-methyladenosine
  modified_base 18: mod_base = um
  modified_base 19: mod_base = OTHER; note = 2'-O-methylcytidine with a 3'-phosphorothioate linkage
  modified_base 20: mod_base = OTHER; note = 2'-O-methyladenosine with a 3'-phosphorothioate linkage
  modified_base 21: mod_base = OTHER; note = 2'-O-methyladenosine
actccaagaatcttttatcaa

SEQ ID NO: 436 - RNA, 21 nt, synthetic construct
  source 1..21: mol_type = other RNA
  modified_base 1: mod_base = OTHER; note = 2'-O-methyladenosine with a 3'-phosphorothioate linkage and a 5' inverted abasic moiety connected via a 5' to 5' phosphorothioate linkage
  modified_base 2: mod_base = OTHER; note = 2'-O-methyladenosine
  modified_base 3: mod_base = gm
  modified_base 4: mod_base = OTHER; note = 2'-O-methyladenosine
  modified_base 5: mod_base = cm
  modified_base 6: mod_base = gm
  modified_base 7: mod_base = gm
  modified_base 8: mod_base = um
  modified_base 9: mod_base = OTHER; note = 2'-fluoroguanosine
  modified_base 10: mod_base = OTHER; note = 2'-fluoroadenosine
  modified_base 11: mod_base = OTHER; note = 2'-fluoroadenosine
  modified_base 12: mod_base = gm
  modified_base 13: mod_base = OTHER; note = 2'-O-methyladenosine
  modified_base 14: mod_base = OTHER; note = 2'-O-methyladenosine
  modified_base 15: mod_base = um
  modified_base 16: mod_base = um
  modified_base 17: mod_base = OTHER; note = 2'-O-methyladenosine
  modified_base 18: mod_base = gm
  modified_base 19: mod_base = OTHER; note = 2'-O-methyladenosine with a 3'-phosphorothioate linkage
  modified_base 20: mod_base = OTHER; note = 2'-O-methyluridine with a 3'-phosphorothioate linkage
  modified_base 21: mod_base = OTHER; note = 2'-O-methyladenosine
aagacggtgaagaattagata

SEQ ID NO: 437 - RNA, 21 nt, synthetic construct
  source 1..21: mol_type = other RNA
  modified_base 1: mod_base = OTHER; note = 2'-O-methylguanosine with a 3'-phosphorothioate linkage and a 5' inverted abasic moiety connected via a 5' to 5' phosphorothioate linkage
  modified_base 2: mod_base = OTHER; note = 2'-O-methyladenosine
  modified_base 3: mod_base = cm
  modified_base 4: mod_base = gm
  modified_base 5: mod_base = gm
  modified_base 6: mod_base = um
  modified_base 7: mod_base = gm
  modified_base 8: mod_base = OTHER; note = 2'-O-methyladenosine
  modified_base 9: mod_base = OTHER; note = 2'-fluoroadenosine
  modified_base 10: mod_base = OTHER; note = 2'-fluoroguanosine
  modified_base 11: mod_base = OTHER; note = 2'-fluoroadenosine
  modified_base 12: mod_base = OTHER; note = 2'-O-methyladenosine
  modified_base 13: mod_base = um
  modified_base 14: mod_base = um
  modified_base 15: mod_base = OTHER; note = 2'-O-methyladenosine
  modified_base 16: mod_base = gm
  modified_base 17: mod_base = OTHER; note = 2'-O-methyladenosine
  modified_base 18: mod_base = um
  modified_base 19: mod_base = OTHER; note = 2'-O-methyladenosine with a 3'-phosphorothioate linkage
  modified_base 20: mod_base = OTHER; note = 2'-O-methylcytidine with a 3'-phosphorothioate linkage
  modified_base 21: mod_base = OTHER; note = 2'-O-methyladenosine
gacggtgaagaattagataca

SEQ ID NO: 438 - RNA, 21 nt, synthetic construct
  source 1..21: mol_type = other RNA
  modified_base 1: mod_base = OTHER; note = 2'-O-methyladenosine with a 3'-phosphorothioate linkage and a 5' inverted abasic moiety connected via a 5' to 5' phosphorothioate linkage
  modified_base 2: mod_base = OTHER; note = 2'-O-methyladenosine
  modified_base 3: mod_base = um
  modified_base 4: mod_base = gm
  modified_base 5: mod_base = gm
  modified_base 6: mod_base = OTHER; note = 2'-O-methyladenosine
  modified_base 7: mod_base = OTHER; note = 2'-O-methyladenosine
  modified_base 8: mod_base = OTHER; note = 2'-O-methyladenosine
  modified_base 9: mod_base = OTHER; note = 2'-fluoroadenosine
  modified_base 10: mod_base = OTHER; note = 2'-fluorocytidine
  modified_base 11: mod_base = OTHER; note = 2'-fluoroadenosine
  modified_base 12: mod_base = OTHER; note = 2'-O-methyladenosine
  modified_base 13: mod_base = um
  modified_base 14: mod_base = cm
  modified_base 15: mod_base = um
  modified_base 16: mod_base = OTHER; note = 2'-O-methyladenosine
  modified_base 17: mod_base = OTHER; note = 2'-O-methyladenosine
  modified_base 18: mod_base = OTHER; note = 2'-O-methyladenosine
  modified_base 19: mod_base = OTHER; note = 2'-O-methyluridine with a 3'-phosphorothioate linkage
  modified_base 20: mod_base = OTHER; note = 2'-O-methylcytidine with a 3'-phosphorothioate linkage
  modified_base 21: mod_base = OTHER; note = 2'-O-methyladenosine
aatggaaaacaatctaaatca

SEQ ID NO: 439 - RNA, 21 nt, synthetic construct
  source 1..21: mol_type = other RNA
  modified_base 1: mod_base = OTHER; note = 2'-O-methylguanosine with a 3'-phosphorothioate linkage and a 5' inverted abasic moiety connected via a 5' to 5' phosphorothioate linkage
  modified_base 2: mod_base = gm
  modified_base 3: mod_base = OTHER; note = 2'-O-methyladenosine
  modified_base 4: mod_base = OTHER; note = 2'-O-methyladenosine
  modified_base 5: mod_base = gm
  modified_base 6: mod_base = OTHER; note = 2'-O-methyladenosine
  modified_base 7: mod_base = OTHER; note = 2'-O-methyladenosine
  modified_base 8: mod_base = gm
  modified_base 9: mod_base = OTHER; note = 2'-fluoroadenosine
  modified_base 10: mod_base = OTHER; note = 2'-fluoroadenosine
  modified_base 11: mod_base = OTHER; note = 2'-fluoroadenosine
  modified_base 12: mod_base = OTHER; note = 2'-O-methyladenosine
  modified_base 13: mod_base = OTHER; note = 2'-O-methyladenosine
  modified_base 14: mod_base = um
  modified_base 15: mod_base = gm
  modified_base 16: mod_base = um
  modified_base 17: mod_base = OTHER; note = 2'-O-methyladenosine
  modified_base 18: mod_base = OTHER; note = 2'-O-methyladenosine
  modified_base 19: mod_base = OTHER; note = 2'-O-methyladenosine with a 3'-phosphorothioate linkage
  modified_base 20: mod_base = OTHER; note = 2'-O-methylguanosine with a 3'-phosphorothioate linkage
  modified_base 21: mod_base = OTHER; note = 2'-O-methyladenosine
ggaagaagaaaaatgtaaaga

SEQ ID NO: 440 - RNA, 23 nt, synthetic construct
  source 1..23: mol_type = other RNA
  modified_base 1: mod_base = OTHER; note = Locked guanosine with a 5' inverted abasic moiety connected via a 5' to 5' phosphorothioate linkage
  modified_base 2: mod_base = OTHER; note = Locked guanosine
  modified_base 3: mod_base = OTHER; note = 2'-O-methyladenosine
  modified_base 4: mod_base = OTHER; note = 2'-O-methyladenosine
  modified_base 5: mod_base = gm
  modified_base 6: mod_base = OTHER; note = 2'-O-methyladenosine
  modified_base 7: mod_base = gm
  modified_base 8: mod_base = um
  modified_base 9: mod_base = OTHER; note = 2'-O-methyladenosine
  modified_base 10: mod_base = um
  modified_base 11: mod_base = OTHER; note = 2'-fluoroguanosine
  modified_base 12: mod_base = OTHER; note = 2'-fluoroadenosine
  modified_base 13: mod_base = OTHER; note = 2'-fluorocytidine
  modified_base 14: mod_base = um
  modified_base 15: mod_base = cm
  modified_base 16: mod_base = OTHER; note = 2'-O-methyladenosine
  modified_base 17: mod_base = um
  modified_base 18: mod_base = um
  modified_base 19: mod_base = OTHER; note = 2'-O-methyladenosine
  modified_base 20: mod_base = OTHER; note = 2'-O-methyladenosine
  modified_base 21: mod_base = OTHER; note = 2'-O-methyluridine with a 3'-phosphorothioate linkage
  modified_base 22: mod_base = OTHER; note = 2'-O-methyladenosine with a 3'-phosphorothioate linkage
  modified_base 23: mod_base = OTHER; note = 2'-O-methyladenosine
ggaagagtatgactcattaataa

SEQ ID NO: 441 - RNA, 21 nt, synthetic construct
  source 1..21: mol_type = other RNA
  modified_base 1: mod_base = OTHER; note = 2'-O-methylcytidine with a 3'-phosphorothioate linkage and a 5' inverted abasic moiety connected via a 5' to 5' phosphorothioate linkage
  modified_base 2: mod_base = OTHER; note = 2'-O-methyladenosine
  modified_base 3: mod_base = gm
  modified_base 4: mod_base = OTHER; note = 2'-O-methyladenosine
  modified_base 5: mod_base = gm
  modified_base 6: mod_base = um
  modified_base 7: mod_base = OTHER; note = 2'-O-methyladenosine
  modified_base 8: mod_base = um
  modified_base 9: mod_base = OTHER; note = 2'-fluoroguanosine
  modified_base 10: mod_base = OTHER; note = 2'-fluoroadenosine
  modified_base 11: mod_base = OTHER; note = 2'-fluorocytidine
  modified_base 12: mod_base = um
  modified_base 13: mod_base = cm
  modified_base 14: mod_base = OTHER; note = 2'-O-methyladenosine
  modified_base 15: mod_base = um
  modified_base 16: mod_base = um
  modified_base 17: mod_base = OTHER; note = 2'-O-methyladenosine
  modified_base 18: mod_base = OTHER; note = 2'-O-methyladenosine
  modified_base 19: mod_base = OTHER; note = 2'-O-methyluridine with a 3'-phosphorothioate linkage
  modified_base 20: mod_base = OTHER; note = 2'-O-methyladenosine with a 3'-phosphorothioate linkage
  modified_base 21: mod_base = OTHER; note = 2'-O-methyladenosine
cagagtatgactcattaataa

SEQ ID NO: 442 - RNA, 20 nt, synthetic construct
  source 1..20: mol_type = other RNA
  modified_base 1: mod_base = OTHER; note = 2'-O-methyladenosine with a 3'-phosphorothioate linkage and a 5' inverted abasic moiety connected via a 5' to 5' phosphorothioate linkage
  modified_base 2: mod_base = gm
  modified_base 3: mod_base = OTHER; note = 2'-O-methyladenosine
  modified_base 4: mod_base = gm
  modified_base 5: mod_base = um
  modified_base 6: mod_base = OTHER; note = 2'-O-methyladenosine
  modified_base 7: mod_base = um
  modified_base 8: mod_base = OTHER; note = 2'-fluoroguanosine
  modified_base 9: mod_base = OTHER; note = 2'-fluoroadenosine
  modified_base 10: mod_base = OTHER; note = 2'-fluorocytidine
  modified_base 11: mod_base = um
  modified_base 12: mod_base = cm
  modified_base 13: mod_base = OTHER; note = 2'-O-methyladenosine
  modified_base 14: mod_base = um
  modified_base 15: mod_base = um
  modified_base 16: mod_base = OTHER; note = 2'-O-methyladenosine
  modified_base 17: mod_base = OTHER; note = 2'-O-methyladenosine
  modified_base 18: mod_base = OTHER; note = 2'-O-methyluridine with a 3'-phosphorothioate linkage
  modified_base 19: mod_base = OTHER; note = 2'-O-methyladenosine with a 3'-phosphorothioate linkage
  modified_base 20: mod_base = OTHER; note = 2'-O-methyladenosine
agagtatgactcattaataa

SEQ ID NO: 443 - RNA, 21 nt, synthetic construct
  source 1..21: mol_type = other RNA
  modified_base 1: mod_base = OTHER; note = 2'-O-methyladenosine with a 3'-phosphorothioate linkage and a 5' inverted abasic moiety connected via a 5' to 5' phosphorothioate linkage
  modified_base 2: mod_base = OTHER; note = 2,6-Diaminopurine
  modified_base 3: mod_base = gm
  modified_base 4: mod_base = OTHER; note = 2'-O-methyladenosine
  modified_base 5: mod_base = gm
  modified_base 6: mod_base = um
  modified_base 7: mod_base = OTHER; note = 2'-O-methyladenosine
  modified_base 8: mod_base = um
  modified_base 9: mod_base = OTHER; note = 2'-fluoroguanosine
  modified_base 10: mod_base = OTHER; note = 2'-fluoroadenosine
  modified_base 11: mod_base = OTHER; note = 2'-fluorocytidine
  modified_base 12: mod_base = um
  modified_base 13: mod_base = cm
  modified_base 14: mod_base = OTHER; note = 2'-O-methyladenosine
  modified_base 15: mod_base = um
  modified_base 16: mod_base = um
  modified_base 17: mod_base = OTHER; note = 2'-O-methyladenosine
  modified_base 18: mod_base = OTHER; note = 2,6-Diaminopurine
  modified_base 19: mod_base = OTHER; note = 2'-O-methyluridine with a 3'-phosphorothioate linkage
  modified_base 20: mod_base = OTHER; note = 2'-O-methyladenosine with a 3'-phosphorothioate linkage
  modified_base 21: mod_base = OTHER; note = 2'-O-methyladenosine
aagagtatgactcattaataa

SEQ ID NO: 444 - RNA, 21 nt, synthetic construct
  source 1..21: mol_type = other RNA
  modified_base 1: mod_base = OTHER; note = Locked adenosine with a 5' inverted abasic moiety connected via a 5' to 5' phosphorothioate linkage
  modified_base 2: mod_base = OTHER; note = Locked adenosine
  modified_base 3: mod_base = gm
  modified_base 4: mod_base = OTHER; note = 2'-O-methyladenosine
  modified_base 5: mod_base = gm
  modified_base 6: mod_base = um
  modified_base 7: mod_base = OTHER; note = 2'-O-methyladenosine
  modified_base 8: mod_base = um
  modified_base 9: mod_base = OTHER; note = 2'-fluoroguanosine
  modified_base 10: mod_base = OTHER; note = 2'-fluoroadenosine
  modified_base 11: mod_base = OTHER; note = 2'-fluorocytidine
  modified_base 12: mod_base = um
  modified_base 13: mod_base = OTHER; note = Locked cytidine
  modified_base 14: mod_base = OTHER; note = 2'-O-methyladenosine
  modified_base 15: mod_base = um
  modified_base 16: mod_base = um
  modified_base 17: mod_base = OTHER; note = 2'-O-methyladenosine
  modified_base 18: mod_base = OTHER; note = 2'-O-methyladenosine
  modified_base 19: mod_base = OTHER; note = 2'-O-methyluridine with a 3'-phosphorothioate linkage
  modified_base 20: mod_base = OTHER; note = 2'-O-methyladenosine with a 3'-phosphorothioate linkage
  modified_base 21: mod_base = OTHER; note = 2'-O-methyladenosine
aagagtatgactcattaataa

SEQ ID NO: 445 - RNA, 21 nt, synthetic construct
  source 1..21: mol_type = other RNA
  modified_base 1: mod_base = OTHER; note = 2,6-Diaminopurine with a 5' inverted abasic moiety connected via a 5' to 5' phosphorothioate linkage
  modified_base 2: mod_base = OTHER; note = 2,6-Diaminopurine
  modified_base 3: mod_base = gm
  modified_base 4: mod_base = OTHER; note = 2'-O-methyladenosine
  modified_base 5: mod_base = gm
  modified_base 6: mod_base = um
  modified_base 7: mod_base = OTHER; note = 2'-O-methyladenosine
  modified_base 8: mod_base = um
  modified_base 9: mod_base = OTHER; note = 2'-fluoroguanosine
  modified_base 10: mod_base = OTHER; note = 2'-fluoroadenosine
  modified_base 11: mod_base = OTHER; note = 2'-fluorocytidine
  modified_base 12: mod_base = um
  modified_base 13: mod_base = OTHER; note = 5-Propynylcytosine
  modified_base 14: mod_base = OTHER; note = 2'-O-methyladenosine
  modified_base 15: mod_base = um
  modified_base 16: mod_base = um
  modified_base 17: mod_base = OTHER; note = 2'-O-methyladenosine
  modified_base 18: mod_base = OTHER; note = 2'-O-methyladenosine
  modified_base 19: mod_base = OTHER; note = 2'-O-methyluridine with a 3'-phosphorothioate linkage
  modified_base 20: mod_base = OTHER; note = 2'-O-methyladenosine with a 3'-phosphorothioate linkage
  modified_base 21: mod_base = OTHER; note = 2'-O-methyladenosine
aagagtatgactcattaataa

SEQ ID NO: 446 - RNA, 21 nt, synthetic construct
  source 1..21: mol_type = other RNA
  modified_base 1: mod_base = OTHER; note = Locked adenosine with a 5' inverted abasic moiety connected via a 5' to 5' phosphorothioate linkage
  modified_base 2: mod_base = OTHER; note = Locked adenosine
  modified_base 3: mod_base = OTHER; note = 2'-O-methyladenosine
  modified_base 4: mod_base = cm
  modified_base 5: mod_base = um
  modified_base 6: mod_base = cm
  modified_base 7: mod_base = cm
  modified_base 8: mod_base = OTHER; note = 2'-O-methyladenosine
  modified_base 9: mod_base = OTHER; note = 2'-fluoroadenosine
  modified_base 10: mod_base = OTHER; note = 2'-fluoroguanosine
  modified_base 11: mod_base = OTHER; note = 2'-fluoroadenosine
  modified_base 12: mod_base = OTHER; note = 2'-O-methyladenosine
  modified_base 13: mod_base = OTHER; note = Locked thymine
  modified_base 14: mod_base = cm
  modified_base 15: mod_base = um
  modified_base 16: mod_base = um
  modified_base 17: mod_base = um
  modified_base 18: mod_base = um
  modified_base 19: mod_base = OTHER; note = 2'-O-methyladenosine with a 3'-phosphorothioate linkage
  modified_base 20: mod_base = OTHER; note = 2'-O-methyluridine with a 3'-phosphorothioate linkage
  modified_base 21: mod_base = OTHER; note = 2'-O-methyladenosine
aaactccaagaatcttttata

SEQ ID NO: 447 - RNA, 23 nt, synthetic construct
  source 1..23: mol_type = other RNA
  modified_base 1: mod_base = OTHER; note = Locked guanosine with a 5' inverted abasic moiety connected via a 5' to 5' phosphorothioate linkage
  modified_base 2: mod_base = OTHER; note = Locked guanosine
  modified_base 3: mod_base = OTHER; note = 2'-O-methyladenosine
  modified_base 4: mod_base = OTHER; note = 2'-O-methyladenosine
  modified_base 5: mod_base = OTHER; note = 2'-O-methyladenosine
  modified_base 6: mod_base = cm
  modified_base 7: mod_base = um
  modified_base 8: mod_base = cm
  modified_base 9: mod_base = cm
  modified_base 10: mod_base = OTHER; note = 2'-O-methyladenosine
  modified_base 11: mod_base = OTHER; note = 2'-fluoroadenosine
  modified_base 12: mod_base = OTHER; note = 2'-fluoroguanosine
  modified_base 13: mod_base = OTHER; note = 2'-fluoroadenosine
  modified_base 14: mod_base = OTHER; note = 2'-O-methyladenosine
  modified_base 15: mod_base = um
  modified_base 16: mod_base = cm
  modified_base 17: mod_base = um
  modified_base 18: mod_base = um
  modified_base 19: mod_base = um
  modified_base 20: mod_base = um
  modified_base 21: mod_base = OTHER; note = 2'-O-methyladenosine with a 3'-phosphorothioate linkage
  modified_base 22: mod_base = OTHER; note = 2'-O-methyluridine with a 3'-phosphorothioate linkage
  modified_base 23: mod_base = OTHER; note = 2'-O-methyladenosine
ggaaactccaagaatcttttata

SEQ ID NO: 448 - RNA, 21 nt, synthetic construct
  source 1..21: mol_type = other RNA
  modified_base 1: mod_base = OTHER; note = 2'-O-methylcytidine with a 3'-phosphorothioate linkage and a 5' inverted abasic moiety connected via a 5' to 5' phosphorothioate linkage
  modified_base 2: mod_base = OTHER; note = 2'-O-methyladenosine
  modified_base 3: mod_base = OTHER; note = 2'-O-methyladenosine
  modified_base 4: mod_base = cm
  modified_base 5: mod_base = um
  modified_base 6: mod_base = cm
  modified_base 7: mod_base = cm
  modified_base 8: mod_base = OTHER; note = 2'-O-methyladenosine
  modified_base 9: mod_base = OTHER; note = 2'-fluoroadenosine
  modified_base 10: mod_base = OTHER; note = 2'-fluoroguanosine
  modified_base 11: mod_base = OTHER; note = 2'-fluoroadenosine
  modified_base 12: mod_base = OTHER; note = 2'-O-methyladenosine
  modified_base 13: mod_base = um
  modified_base 14: mod_base = cm
  modified_base 15: mod_base = um
  modified_base 16: mod_base = um
  modified_base 17: mod_base = um
  modified_base 18: mod_base = um
  modified_base 19: mod_base = OTHER; note = 2'-O-methyladenosine with a 3'-phosphorothioate linkage
  modified_base 20: mod_base = OTHER; note = 2'-O-methyluridine with a 3'-phosphorothioate linkage
  modified_base 21: mod_base = OTHER; note = 2'-O-methyladenosine
caactccaagaatcttttata

SEQ ID NO: 449 - RNA, 21 nt, synthetic construct
  source 1..21: mol_type = other RNA
  modified_base 1: mod_base = OTHER; note = 2'-O-methoxyethyladenosine with a 3'-phosphorothioate linkage and a 5' inverted abasic moiety connected via a 5' to 5' phosphorothioate linkage
  modified_base 2: mod_base = OTHER; note = 2'-O-methoxyethyladenosine
  modified_base 3: mod_base = OTHER; note = 2'-O-methyladenosine
  modified_base 4: mod_base = cm
  modified_base 5: mod_base = um
  modified_base 6: mod_base = cm
  modified_base 7: mod_base = cm
  modified_base 8: mod_base = OTHER; note = 2'-O-methyladenosine
  modified_base 9: mod_base = OTHER; note = 2'-fluoroadenosine
  modified_base 10: mod_base = OTHER; note = 2'-fluoroguanosine
  modified_base 11: mod_base = OTHER; note = 2'-fluoroadenosine
  modified_base 12: mod_base = OTHER; note = 2'-O-methyladenosine
  modified_base 13: mod_base = um
  modified_base 14: mod_base = cm
  modified_base 15: mod_base = um
  modified_base 16: mod_base = um
  modified_base 17: mod_base = um
  modified_base 18: mod_base = um
  modified_base 19: mod_base = OTHER; note = 2'-O-methyladenosine with a 3'-phosphorothioate linkage
  modified_base 20: mod_base = OTHER; note = 2'-O-methyluridine with a 3'-phosphorothioate linkage
  modified_base 21: mod_base = OTHER; note = 2'-O-methyladenosine
aaactccaagaatcttttata

SEQ ID NO: 450 - RNA, 20 nt, synthetic construct
  source 1..20: mol_type = other RNA
  modified_base 1: mod_base = OTHER; note = 2'-O-methyladenosine with a 3'-phosphorothioate linkage and a 5' inverted abasic moiety connected via a 5' to 5' phosphorothioate linkage
  modified_base 2: mod_base = OTHER; note = 2'-O-methyladenosine
  modified_base 3: mod_base = cm
  modified_base 4: mod_base = um
  modified_base 5: mod_base = cm
  modified_base 6: mod_base = cm
  modified_base 7: mod_base = OTHER; note = 2'-O-methyladenosine
  modified_base 8: mod_base = OTHER; note = 2'-fluoroadenosine
  modified_base 9: mod_base = OTHER; note = 2'-fluoroguanosine
  modified_base 10: mod_base = OTHER; note = 2'-fluoroadenosine
  modified_base 11: mod_base = OTHER; note = 2'-O-methyladenosine
  modified_base 12: mod_base = um
  modified_base 13: mod_base = cm
  modified_base 14: mod_base = um
  modified_base 15: mod_base = um
  modified_base 16: mod_base = um
  modified_base 17: mod_base = um
  modified_base 18: mod_base = OTHER; note = 2'-O-methyladenosine with a 3'-phosphorothioate linkage
  modified_base 19: mod_base = OTHER; note = 2'-O-methyluridine with a 3'-phosphorothioate linkage
  modified_base 20: mod_base = OTHER; note = 2'-O-methyladenosine
aactccaagaatcttttata

SEQ ID NO: 451 - RNA, 21 nt, synthetic construct
  source 1..21: mol_type = other RNA
  modified_base 1: mod_base = OTHER; note = 2'-O-methyladenosine with a 3'-phosphorothioate linkage and a 5' inverted abasic moiety connected via a 5' to 5' phosphorothioate linkage
  modified_base 2: mod_base = OTHER; note = 2'-O-methyladenosine
  modified_base 3: mod_base = OTHER; note = 2'-O-methyladenosine
  modified_base 4: mod_base = cm
  modified_base 5: mod_base = um
  modified_base 6: mod_base = cm
  modified_base 7: mod_base = cm
  modified_base 8: mod_base = OTHER; note = 2'-O-methyladenosine
  modified_base 9: mod_base = OTHER; note = 2'-fluoroadenosine
  modified_base 10: mod_base = OTHER; note = 2'-fluoroguanosine
  modified_base 11: mod_base = OTHER; note = 2'-fluoroadenosine
  modified_base 12: mod_base = OTHER; note = 2'-O-methyladenosine
  modified_base 13: mod_base = um
  modified_base 14: mod_base = cm
  modified_base 15: mod_base = um
  modified_base 16: mod_base = um
  modified_base 17: mod_base = um
  modified_base 18: mod_base = um
  modified_base 19: mod_base = OTHER; note = 2'-O-methyladenosine with a 3'-phosphorothioate linkage
  modified_base 20: mod_base = OTHER; note = 2'-O-methyluridine with a 3'-phosphorothioate linkage
  modified_base 21: mod_base = gm
aaactccaagaatcttttatg

SEQ ID NO: 452 - RNA, 23 nt, synthetic construct
  source 1..23: mol_type = other RNA
  modified_base 1: mod_base = OTHER; note = Locked guanosine with a 5' inverted abasic moiety connected via a 5' to 5' phosphorothioate linkage
  modified_base 2: mod_base = OTHER; note = Locked guanosine
  modified_base 3: mod_base = OTHER; note = 2'-O-methyladenosine
  modified_base 4: mod_base = OTHER; note = 2'-O-methyladenosine
  modified_base 5: mod_base = cm
  modified_base 6: mod_base = um
  modified_base 7: mod_base = cm
  modified_base 8: mod_base = cm
  modified_base 9: mod_base = OTHER; note = 2'-O-methyladenosine
  modified_base 10: mod_base = OTHER; note = 2'-O-methyladenosine
  modified_base 11: mod_base = OTHER; note = 2'-fluoroguanosine
  modified_base 12: mod_base = OTHER; note = 2'-fluoroadenosine
  modified_base 13: mod_base = OTHER; note = 2'-fluoroadenosine
  modified_base 14: mod_base = um
  modified_base 15: mod_base = cm
  modified_base 16: mod_base = um
  modified_base 17: mod_base = um
  modified_base 18: mod_base = um
  modified_base 19: mod_base = um
  modified_base 20: mod_base = OTHER; note = 2'-O-methyladenosine
  modified_base 21: mod_base = OTHER; note = 2'-O-methyluridine with a 3'-phosphorothioate linkage
  modified_base 22: mod_base = OTHER; note = 2'-O-methylcytidine with a 3'-phosphorothioate linkage
  modified_base 23: mod_base = OTHER; note = 2'-O-methyladenosine
ggaactccaagaatcttttatca

SEQ ID NO: 453 - RNA, 21 nt, synthetic construct
  source 1..21: mol_type = other RNA
  modified_base 1: mod_base = OTHER; note = 2'-O-methyladenosine with a 3'-phosphorothioate linkage and a 5' inverted abasic moiety connected via a 5' to 5' phosphorothioate linkage
  modified_base 2: mod_base = OTHER; note = 2'-O-methyladenosine
  modified_base 3: mod_base = cm
  modified_base 4: mod_base = um
  modified_base 5: mod_base = cm
  modified_base 6: mod_base = cm
  modified_base 7: mod_base = OTHER; note = 2'-O-methyladenosine
  modified_base 8: mod_base = OTHER; note = 2'-O-methyladenosine
  modified_base 9: mod_base = OTHER; note = 2'-fluoroguanosine
  modified_base 10: mod_base = OTHER; note = 2'-fluoroadenosine
  modified_base 11: mod_base = OTHER; note = 2'-fluoroadenosine
  modified_base 12: mod_base = um
  modified_base 13: mod_base = cm
  modified_base 14: mod_base = um
  modified_base 15: mod_base = OTHER; note = 2'-O-methyladenosine
  modified_base 16: mod_base = um
  modified_base 17: mod_base = um
  modified_base 18: mod_base = OTHER; note = 2'-O-methyladenosine
  modified_base 19: mod_base = OTHER; note = 2'-O-methyluridine with a 3'-phosphorothioate linkage
  modified_base 20: mod_base = OTHER; note = 2'-O-methylcytidine with a 3'-phosphorothioate linkage
  modified_base 21: mod_base = OTHER; note = 2'-O-methyladenosine
aactccaagaatctattatca

SEQ ID NO: 454 - RNA, 21 nt, synthetic construct
  source 1..21: mol_type = other RNA
  modified_base 1: mod_base = OTHER; note = 2'-O-methyladenosine with a 3'-phosphorothioate linkage and a 5' inverted abasic moiety connected via a 5' to 5' phosphorothioate linkage
  modified_base 2: mod_base = OTHER; note = 2'-O-methyladenosine
  modified_base 3: mod_base = cm
  modified_base 4: mod_base = OTHER; note = Pseudouridine
  modified_base 5: mod_base = cm
  modified_base 6: mod_base = cm
  modified_base 7: mod_base = OTHER; note = 2'-O-methyladenosine
  modified_base 8: mod_base = OTHER; note = 2'-O-methyladenosine
  modified_base 9: mod_base = OTHER; note = 2'-fluoroguanosine
  modified_base 10: mod_base = OTHER; note = 2'-fluoroadenosine
  modified_base 11: mod_base = OTHER; note = 2'-fluoroadenosine
  modified_base 12: mod_base = OTHER; note = Pseudouridine
  modified_base 13: mod_base = cm
  modified_base 14: mod_base = um
  modified_base 15: mod_base = um
  modified_base 16: mod_base = um
  modified_base 17: mod_base = um
  modified_base 18: mod_base = OTHER; note = 2'-O-methyladenosine
  modified_base 19: mod_base = OTHER; note = 2'-O-methyluridine with a 3'-phosphorothioate linkage
  modified_base 20: mod_base = OTHER; note = 2'-O-methylcytidine with a 3'-phosphorothioate linkage
  modified_base 21: mod_base = OTHER; note = 2'-O-methyladenosine
aacnccaagaancttttatca

SEQ ID NO: 455 - RNA, 21 nt, synthetic construct
  source 1..21: mol_type = other RNA
  modified_base 1: mod_base = OTHER; note = 2'-O-methyladenosine with a 3'-phosphorothioate linkage and a 5' inverted abasic moiety connected via a 5' to 5' phosphorothioate linkage
  modified_base 2: mod_base = OTHER; note = 2'-O-methyladenosine
  modified_base 3: mod_base = cm
  modified_base 4: mod_base = um
  modified_base 5: mod_base = cm
  modified_base 6: mod_base = cm
  modified_base 7: mod_base = OTHER; note = 2'-O-methyladenosine
  modified_base 8: mod_base = OTHER; note = 2'-O-methyladenosine
  modified_base 9: mod_base = OTHER; note = 2'-fluoroguanosine
  modified_base 10: mod_base = OTHER; note = 2'-fluoroadenosine
  modified_base 11: mod_base = OTHER; note = 2'-fluoroadenosine
  modified_base 12: mod_base = um
  modified_base 13: mod_base = cm
  modified_base 14: mod_base = um
  modified_base 15: mod_base = um
  modified_base 16: mod_base = um
  modified_base 17: mod_base = um
  modified_base 18: mod_base = OTHER; note = 2'-O-methyladenosine
  modified_base 19: mod_base = OTHER; note = 2'-O-methyluridine with a 3'-phosphorothioate linkage
  modified_base 20: mod_base = OTHER; note = 2'-O-methylcytidine with a 3'-phosphorothioate linkage
  modified_base 21: mod_base = gm
aactccaagaatcttttatcg

SEQ ID NO: 456 - DNA, 23 bp, synthetic construct
  source 1..23: mol_type = other DNA
  modified_base 1: mod_base = OTHER; note = 2'-O-methyladenosine with a 3'-phosphorothioate linkage and a 5' inverted abasic moiety connected via a 5' to 5' phosphorothioate linkage
  modified_base 2: mod_base = OTHER; note = 2'-O-methyladenosine
  modified_base 3: mod_base = cm
  modified_base 4: mod_base = um
  modified_base 5: mod_base = cm
  modified_base 6: mod_base = cm
  modified_base 7: mod_base = OTHER; note = 2'-O-methyladenosine
  modified_base 8: mod_base = OTHER; note = 2'-O-methyladenosine
  modified_base 9: mod_base = OTHER; note = 2'-fluoroguanosine
  modified_base 10: mod_base = OTHER; note = 2'-fluoroadenosine
  modified_base 11: mod_base = OTHER; note = 2'-fluoroadenosine
  modified_base 12: mod_base = um
  modified_base 13: mod_base = cm
  modified_base 14: mod_base = um
  modified_base 15: mod_base = um
  modified_base 16: mod_base = um
  modified_base 17: mod_base = um
  modified_base 18: mod_base = OTHER; note = 2'-O-methyladenosine
  modified_base 19: mod_base = OTHER; note = 2'-O-methyluridine with a 3'-phosphorothioate linkage
  modified_base 20: mod_base = OTHER; note = 2'-O-methylcytidine with a 3'-phosphorothioate linkage
  modified_base 21: mod_base = OTHER; note = 2'-O-methyladenosine
  misc_feature 1..21: note = RNA
  misc_feature 22..23: note = DNA
aactccaagaatcttttatcatt

SEQ ID NO: 457 - RNA, 21 nt, synthetic construct
  source 1..21: mol_type = other RNA
  modified_base 1: mod_base = OTHER; note = 2'-O-methylcytidine with a 3'-phosphorothioate linkage and a 5' inverted abasic moiety connected via a 5' to 5' phosphorothioate linkage
  modified_base 2: mod_base = OTHER; note = 2'-O-methyladenosine
  modified_base 3: mod_base = cm
  modified_base 4: mod_base = um
  modified_base 5: mod_base = cm
  modified_base 6: mod_base = cm
  modified_base 7: mod_base = OTHER; note = 2'-O-methyladenosine
  modified_base 8: mod_base = OTHER; note = 2'-O-methyladenosine
  modified_base 9: mod_base = OTHER; note = 2'-fluoroguanosine
  modified_base 10: mod_base = OTHER; note = 2'-fluoroadenosine
  modified_base 11: mod_base = OTHER; note = 2'-fluoroadenosine
  modified_base 12: mod_base = um
  modified_base 13: mod_base = cm
  modified_base 14: mod_base = um
  modified_base 15: mod_base = um
  modified_base 16: mod_base = um
  modified_base 17: mod_base = um
  modified_base 18: mod_base = OTHER; note = 2'-O-methyladenosine
  modified_base 19: mod_base = OTHER; note = 2'-O-methyluridine with a 3'-phosphorothioate linkage
  modified_base 20: mod_base = OTHER; note = 2'-O-methylcytidine with a 3'-phosphorothioate linkage
  modified_base 21: mod_base = OTHER; note = 2'-O-methyladenosine
cactccaagaatcttttatca

SEQ ID NO: 458 - RNA, 21 nt, synthetic construct
  source 1..21: mol_type = other RNA
  modified_base 1: mod_base = OTHER; note = Locked adenosine with a 5' inverted abasic moiety connected via a 5' to 5' phosphorothioate linkage
  modified_base 2: mod_base = OTHER; note = Locked guanosine
  modified_base 3: mod_base = gm
  modified_base 4: mod_base = OTHER; note = 2'-O-methyladenosine
  modified_base 5: mod_base = OTHER; note = 2'-O-methyladenosine
  modified_base 6: mod_base = gm
  modified_base 7: mod_base = OTHER; note = 2'-O-methyladenosine
  modified_base 8: mod_base = OTHER; note = 2'-O-methyladenosine
  modified_base 9: mod_base = OTHER; note = 2'-fluoroguanosine
  modified_base 10: mod_base = OTHER; note = 2'-fluoroadenosine
  modified_base 11: mod_base = OTHER; note = 2'-fluoroadenosine
  modified_base 12: mod_base = OTHER; note = 2'-O-methyladenosine
  modified_base 13: mod_base = OTHER; note = Locked adenosine
  modified_base 14: mod_base = OTHER; note = 2'-O-methyladenosine
  modified_base 15: mod_base = um
  modified_base 16: mod_base = gm
  modified_base 17: mod_base = um
  modified_base 18: mod_base = OTHER; note = 2'-O-methyladenosine
  modified_base 19: mod_base = OTHER; note = 2'-O-methyladenosine with a 3'-phosphorothioate linkage
  modified_base 20: mod_base = OTHER; note = 2'-O-methyladenosine with a 3'-phosphorothioate linkage
  modified_base 21: mod_base = OTHER; note = 2'-O-methyladenosine
aggaagaagaaaaatgtaaaa

SEQ ID NO: 459 - RNA, 21 nt, synthetic construct
  source 1..21: mol_type = other RNA
  modified_base 1: mod_base = OTHER; note = 2'-O-methylcytidine with a 3'-phosphorothioate linkage and a 5' inverted abasic moiety connected via a 5' to 5' phosphorothioate linkage
  modified_base 2: mod_base = gm
  modified_base 3: mod_base = gm
  modified_base 4: mod_base = OTHER; note = 2'-O-methyladenosine
  modified_base 5: mod_base = OTHER; note = 2'-O-methyladenosine
  modified_base 6: mod_base = gm
  modified_base 7: mod_base = OTHER; note = 2'-O-methyladenosine
  modified_base 8: mod_base = OTHER; note = 2'-O-methyladenosine
  modified_base 9: mod_base = OTHER; note = 2'-fluoroguanosine
  modified_base 10: mod_base = OTHER; note = 2'-fluoroadenosine
  modified_base 11: mod_base = OTHER; note = 2'-fluoroadenosine
  modified_base 12: mod_base = OTHER; note = 2'-O-methyladenosine
  modified_base 13: mod_base = OTHER; note = 2'-O-methyladenosine
  modified_base 14: mod_base = OTHER; note = 2'-O-methyladenosine
  modified_base 15: mod_base = um
  modified_base 16: mod_base = gm
  modified_base 17: mod_base = um
  modified_base 18: mod_base = OTHER; note = 2'-O-methyladenosine
  modified_base 19: mod_base = OTHER; note = 2'-O-methyladenosine with a 3'-phosphorothioate linkage
  modified_base 20: mod_base = OTHER; note = 2'-O-methyladenosine with a 3'-phosphorothioate linkage
  modified_base 21: mod_base = OTHER; note = 2'-O-methyladenosine
cggaagaagaaaaatgtaaaa

SEQ ID NO: 460 - RNA, 21 nt, synthetic construct
  source 1..21: mol_type = other RNA
  modified_base 1: mod_base = OTHER; note = 2'-O-methoxyethyladenosine with a 3'-phosphorothioate linkage and a 5' inverted abasic moiety connected via a 5' to 5' phosphorothioate linkage
  modified_base 2: mod_base = OTHER; note = 2'-O-methoxyethylguanosine
  modified_base 3: mod_base = gm
  modified_base 4: mod_base = OTHER; note = 2'-O-methyladenosine
  modified_base 5: mod_base = OTHER; note = 2'-O-methyladenosine
  modified_base 6: mod_base = gm
  modified_base 7: mod_base = OTHER; note = 2'-O-methyladenosine
  modified_base 8: mod_base = OTHER; note = 2'-O-methyladenosine
  modified_base 9: mod_base = OTHER; note = 2'-fluoroguanosine
  modified_base 10: mod_base = OTHER; note = 2'-fluoroadenosine
  modified_base 11: mod_base = OTHER; note = 2'-fluoroadenosine
  modified_base 12: mod_base = OTHER; note = 2'-O-methyladenosine
  modified_base 13: mod_base = OTHER; note = 2'-O-methyladenosine
  modified_base 14: mod_base = OTHER; note = 2'-O-methyladenosine
  modified_base 15: mod_base = um
  modified_base 16: mod_base = gm
  modified_base 17: mod_base = um
  modified_base 18: mod_base = OTHER; note = 2'-O-methyladenosine
  modified_base 19: mod_base = OTHER; note = 2'-O-methyladenosine with a 3'-phosphorothioate linkage
  modified_base 20: mod_base = OTHER; note = 2'-O-methyladenosine with a 3'-phosphorothioate linkage
  modified_base 21: mod_base = OTHER; note = 2'-O-methyladenosine
aggaagaagaaaaatgtaaaa

SEQ ID NO: 461 - RNA, 20 nt, synthetic construct
  source 1..20: mol_type = other RNA
  modified_base 1: mod_base = OTHER; note = 2'-O-methylguanosine with a 3'-phosphorothioate linkage and a 5' inverted abasic moiety connected via a 5' to 5' phosphorothioate linkage
  modified_base 2: mod_base = gm
  modified_base 3: mod_base = OTHER; note = 2'-O-methyladenosine
  modified_base 4: mod_base = OTHER; note = 2'-O-methyladenosine
  modified_base 5: mod_base = gm
  modified_base 6: mod_base = OTHER; note = 2'-O-methyladenosine
  modified_base 7: mod_base = OTHER; note = 2'-O-methyladenosine
  modified_base 8: mod_base = OTHER; note = 2'-fluoroguanosine
  modified_base 9: mod_base = OTHER; note = 2'-fluoroadenosine
  modified_base 10: mod_base = OTHER; note = 2'-fluoroadenosine
  modified_base 11: mod_base = OTHER; note = 2'-O-methyladenosine
  modified_base 12: mod_base = OTHER; note = 2'-O-methyladenosine
  modified_base 13: mod_base = OTHER; note = 2'-O-methyladenosine
  modified_base 14: mod_base = um
  modified_base 15: mod_base = gm
  modified_base 16: mod_base = um
  modified_base 17: mod_base = OTHER; note = 2'-O-methyladenosine
  modified_base 18: mod_base = OTHER; note = 2'-O-methyladenosine with a 3'-phosphorothioate linkage
  modified_base 19: mod_base = OTHER; note = 2'-O-methyladenosine with a 3'-phosphorothioate linkage
  modified_base 20: mod_base = OTHER; note = 2'-O-methyladenosine
ggaagaagaaaaatgtaaaa

SEQ ID NO: 462 - RNA, 21 nt, synthetic construct
  source 1..21: mol_type = other RNA
  modified_base 1: mod_base = OTHER; note = 2'-O-methyladenosine with a 3'-phosphorothioate linkage and a 5' inverted abasic moiety connected via a 5' to 5' phosphorothioate linkage
  modified_base 2: mod_base = gm
  modified_base 3: mod_base = gm
  modified_base 4: mod_base = OTHER; note = 2'-O-methyladenosine
  modified_base 5: mod_base = OTHER; note = 2'-O-methyladenosine
  modified_base 6: mod_base = gm
  modified_base 7: mod_base = OTHER; note = 2'-O-methyladenosine
  modified_base 8: mod_base = OTHER; note = 2'-O-methyladenosine
  modified_base 9: mod_base = OTHER; note = 2'-fluoroguanosine
  modified_base 10: mod_base = OTHER; note = 2'-fluoroadenosine
  modified_base 11: mod_base = OTHER; note = 2'-fluoroadenosine
  modified_base 12: mod_base = OTHER; note = 2'-O-methyladenosine
  modified_base 13: mod_base = OTHER; note = 2'-O-methyladenosine
  modified_base 14: mod_base = OTHER; note = 2'-O-methyladenosine
  modified_base 15: mod_base = um
  modified_base 16: mod_base = gm
  modified_base 17: mod_base = um
  modified_base 18: mod_base = OTHER; note = 2'-O-methyladenosine
  modified_base 19: mod_base = OTHER; note = 2'-O-methyladenosine with a 3'-phosphorothioate linkage
  modified_base 20: mod_base = OTHER; note = 2'-O-methyladenosine with a 3'-phosphorothioate linkage
  modified_base 21: mod_base = gm
aggaagaagaaaaatgtaaag

SEQ ID NO: 463 - RNA, 21 nt, synthetic construct
  source 1..21: mol_type = other RNA
  modified_base 1: mod_base = OTHER; note = 2'-O-methyladenosine with a 3'-phosphorothioate linkage and a 5' inverted abasic moiety connected via a 5' to 5' phosphorothioate linkage
  modified_base 2: mod_base = gm
  modified_base 3: mod_base = gm
  modified_base 4: mod_base = OTHER; note = 2'-O-methyladenosine
  modified_base 5: mod_base = OTHER; note = 2'-O-methyladenosine
  modified_base 6: mod_base = gm
  modified_base 7: mod_base = OTHER; note = 2'-O-methyladenosine
  modified_base 8: mod_base = OTHER; note = 2'-O-methyladenosine
  modified_base 9: mod_base = OTHER; note = 2'-fluoroguanosine
  modified_base 10: mod_base = OTHER; note = 2'-fluoroguanosine
  modified_base 11: mod_base = OTHER; note = 2'-fluoroadenosine
  modified_base 12: mod_base = OTHER; note = 2'-O-methyladenosine
  modified_base 13: mod_base = OTHER; note = 2'-O-methyladenosine
  modified_base 14: mod_base = OTHER; note = 2'-O-methyladenosine
  modified_base 15: mod_base = um
  modified_base 16: mod_base = gm
  modified_base 17: mod_base = um
  modified_base 18: mod_base = OTHER; note = 2'-O-methyladenosine
  modified_base 19: mod_base = OTHER; note = 2'-O-methyladenosine with a 3'-phosphorothioate linkage
  modified_base 20: mod_base = OTHER; note = 2'-O-methyladenosine with a 3'-phosphorothioate linkage
  modified_base 21: mod_base = OTHER; note = 2'-O-methyladenosine
aggaagaaggaaaatgtaaaa

SEQ ID NO: 464 - RNA, 23 nt, synthetic construct
  source 1..23: mol_type = other RNA
  modified_base 1: mod_base = OTHER; note = 2'-O-methyluridine with a 3'-phosphorothioate linkage
  modified_base 2: mod_base = OTHER; note = 2'-fluorouridine with a 3'-phosphorothioate linkage
  modified_base 3: mod_base = OTHER; note = 2'-O-methyladenosine
  modified_base 4: mod_base = um
  modified_base 5: mod_base = OTHER; note = 2'-fluorouridine
  modified_base 6: mod_base = OTHER; note = 2'-O-methyladenosine
  modified_base 7: mod_base = OTHER; note = 2'-fluoroadenosine
  modified_base 8: mod_base = um
  modified_base 9: mod_base = gm
  modified_base 10: mod_base = OTHER; note = 2'-O-methyladenosine
  modified_base 11: mod_base = gm
  modified_base 12: mod_base = um
  modified_base 13: mod_base = cm
  modified_base 14: mod_base = OTHER; note = 2'-fluoroadenosine
  modified_base 15: mod_base = um
  modified_base 16: mod_base = OTHER; note = 2'-fluoroadenosine
  modified_base 17: mod_base = cm
  modified_base 18: mod_base = um
  modified_base 19: mod_base = cm
  modified_base 20: mod_base = um
  modified_base 21: mod_base = OTHER; note = 2'-O-methyluridine with a 3'-phosphorothioate linkage
  modified_base 22: mod_base = OTHER; note = 2'-O-methylguanosine with a 3'-phosphorothioate linkage
  modified_base 23: mod_base = gm
ttattaatgagtcatactcttgg

SEQ ID NO: 465 - RNA, 23 nt, synthetic construct
  source 1..23: mol_type = other RNA
  modified_base 1: mod_base = OTHER; note = 2'-O-methyluridine with a 3'-phosphorothioate linkage
  modified_base 2: mod_base = OTHER; note = 2'-fluoroadenosine with a 3'-phosphorothioate linkage
  modified_base 3: mod_base = gm
  modified_base 4: mod_base = um
  modified_base 5: mod_base = OTHER; note = 2'-fluorouridine
  modified_base 6: mod_base = cm
  modified_base 7: mod_base = OTHER; note = 2'-fluoroadenosine
  modified_base 8: mod_base = OTHER; note = 2'-O-methyladenosine
  modified_base 9: mod_base = OTHER; note = 2'-O-methyladenosine
  modified_base 10: mod_base = OTHER; note = 2'-O-methyladenosine
  modified_base 11: mod_base = OTHER; note = 2'-O-methyladenosine
  modified_base 12: mod_base = um
  modified_base 13: mod_base = um
  modified_base 14: mod_base = OTHER; note = 2'-fluoroguanosine
  modified_base 15: mod_base = gm
  modified_base 16: mod_base = OTHER; note = 2'-fluoroadenosine
  modified_base 17: mod_base = OTHER; note = 2'-O-methyladenosine
  modified_base 18: mod_base = OTHER; note = 2'-O-methyladenosine
  modified_base 19: mod_base = OTHER; note = 2'-O-methyladenosine
  modified_base 20: mod_base = um
  modified_base 21: mod_base = OTHER; note = 2'-O-methyluridine with a 3'-phosphorothioate linkage
  modified_base 22: mod_base = OTHER; note = 2'-O-methylguanosine with a 3'-phosphorothioate linkage
  modified_base 23: mod_base = gm
tagttcaaaaattggaaaattgg

SEQ ID NO: 466 - RNA, 23 nt, synthetic construct
  source 1..23: mol_type = other RNA
  modified_base 1: mod_base = OTHER; note = 2'-O-methyluridine with a 3'-phosphorothioate linkage
  modified_base 2: mod_base = OTHER; note = 2'-fluorocytidine with a 3'-phosphorothioate linkage
  modified_base 3: mod_base = OTHER; note = 2'-O-methyladenosine
  modified_base 4: mod_base = um
  modified_base 5: mod_base = OTHER; note = 2'-fluoroadenosine
  modified_base 6: mod_base = OTHER; note = 2'-O-methyladenosine
  modified_base 7: mod_base = OTHER; note = 2'-fluoroguanosine
  modified_base 8: mod_base = um
  modified_base 9: mod_base = um
  modified_base 10: mod_base = um
  modified_base 11: mod_base = gm
  modified_base 12: mod_base = OTHER; note = 2'-O-methyladenosine
  modified_base 13: mod_base = OTHER; note = 2'-O-methyladenosine
  modified_base 14: mod_base = OTHER; note = 2'-fluorouridine
  modified_base 15: mod_base = gm
  modified_base 16: mod_base = OTHER; note = 2'-fluoroadenosine
  modified_base 17: mod_base = um
  modified_base 18: mod_base = um
  modified_base 19: mod_base = cm
  modified_base 20: mod_base = um
  modified_base 21: mod_base = OTHER; note = 2'-O-methyluridine with a 3'-phosphorothioate linkage
  modified_base 22: mod_base = OTHER; note = 2'-O-methylguanosine with a 3'-phosphorothioate linkage
  modified_base 23: mod_base = gm
tcataagtttgaatgattcttgg

SEQ ID NO: 467 - RNA, 23 nt, synthetic construct
  source 1..23: mol_type = other RNA
  modified_base 1: mod_base = OTHER; note = 2'-O-methyluridine with a 3'-phosphorothioate linkage
  modified_base 2: mod_base = OTHER; note = 2'-fluoroguanosine with a 3'-phosphorothioate linkage
  modified_base 3: mod_base = OTHER; note = 2'-O-methyladenosine
  modified_base 4: mod_base = um
  modified_base 5: mod_base = OTHER; note = 2'-fluoroadenosine
  modified_base 6: mod_base = OTHER; note = 2'-O-methyladenosine
  modified_base 7: mod_base = OTHER; note = 2'-fluoroadenosine
  modified_base 8: mod_base = OTHER; note = 2'-O-methyladenosine
  modified_base 9: mod_base = gm
  modified_base 10: mod_base = OTHER; note = 2'-O-methyladenosine
  modified_base 11: mod_base = um
  modified_base 12: mod_base = um
  modified_base 13: mod_base = cm
  modified_base 14: mod_base = OTHER; note = 2'-fluorouridine
  modified_base 15: mod_base = um
  modified_base 16: mod_base = OTHER; note = 2'-fluoroguanosine
  modified_base 17: mod_base = gm
  modified_base 18: mod_base = OTHER; note = 2'-O-methyladenosine
  modified_base 19: mod_base = gm
  modified_base 20: mod_base = um
  modified_base 21: mod_base = OTHER; note = 2'-O-methyluridine with a 3'-phosphorothioate linkage
  modified_base 22: mod_base = OTHER; note = 2'-O-methylguanosine with a 3'-phosphorothioate linkage
  modified_base 23: mod_base = gm
tgataaaagattcttggagttgg

SEQ ID NO: 468 - RNA, 23 nt, synthetic construct
  source 1..23: mol_type = other RNA
  modified_base 1: mod_base = OTHER; note = 2'-O-methyluridine with a 3'-phosphorothioate linkage
  modified_base 2: mod_base = OTHER; note = 2'-fluorouridine with a 3'-phosphorothioate linkage
  modified_base 3: mod_base = um
  modified_base 4: mod_base = OTHER; note = 2'-O-methyladenosine
  modified_base 5: mod_base = OTHER; note = 2'-fluoroguanosine
  modified_base 6: mod_base = OTHER; note = 2'-O-methyladenosine
  modified_base 7: mod_base = OTHER; note = 2'-fluorouridine
  modified_base 8: mod_base = um
  modified_base 9: mod_base = gm
  modified_base 10: mod_base = um
  modified_base 11: mod_base = um
  modified_base 12: mod_base = um
  modified_base 13: mod_base = um
  modified_base 14: mod_base = OTHER; note = 2'-fluorocytidine
  modified_base 15: mod_base = cm
  modified_base 16: mod_base = OTHER; note = 2'-fluoroadenosine
  modified_base 17: mod_base = um
  modified_base 18: mod_base = um
  modified_base 19: mod_base = um
  modified_base 20: mod_base = cm
  modified_base 21: mod_base = OTHER; note = 2'-O-methyluridine with a 3'-phosphorothioate linkage
  modified_base 22: mod_base = OTHER; note = 2'-O-methylguanosine with a 3'-phosphorothioate linkage
  modified_base 23: mod_base = gm
tttagattgttttccatttctgg

SEQ ID NO: 469 - RNA, 23 nt, synthetic construct
  source 1..23: mol_type = other RNA
  modified_base 1: mod_base = OTHER; note = 2'-O-methyluridine with a 3'-phosphorothioate linkage
  modified_base 2: mod_base = OTHER; note = 2'-fluorouridine with a 3'-phosphorothioate linkage
  modified_base 3: mod_base = um
  modified_base 4: mod_base = um
  modified_base 5: mod_base = OTHER; note = 2'-fluoroadenosine
  modified_base 6: mod_base = cm
  modified_base 7: mod_base = OTHER; note = 2'-fluoroadenosine
  modified_base 8: mod_base = um
  modified_base 9: mod_base = um
  modified_base 10: mod_base = um
  modified_base 11: mod_base = um
  modified_base 12: mod_base = um
  modified_base 13: mod_base = cm
  modified_base 14: mod_base = OTHER; note = 2'-fluorouridine
  modified_base 15: mod_base = um
  modified_base 16: mod_base = OTHER; note = 2'-fluorocytidine
  modified_base 17: mod_base = um
  modified_base 18: mod_base = um
  modified_base 19: mod_base = cm
  modified_base 20: mod_base = cm
  modified_base 21: mod_base = OTHER; note = 2'-O-methyluridine with a 3'-phosphorothioate linkage
  modified_base 22: mod_base = OTHER; note = 2'-O-methylguanosine with a 3'-phosphorothioate linkage
  modified_base 23: mod_base = gm
ttttacatttttcttcttcctgg

SEQ ID NO: 470 - RNA, 23 nt, synthetic construct
  source 1..23: mol_type = other RNA
  modified_base 1: mod_base = OTHER; note = 2'-O-methyluridine with a 3'-phosphorothioate linkage
  modified_base 2: mod_base = OTHER; note = 2'-fluorouridine with a 3'-phosphorothioate linkage
  modified_base 3: mod_base = OTHER; note = 2'-O-methyladenosine
  modified_base 4: mod_base = um
  modified_base 5: mod_base = OTHER; note = 2'-fluorouridine
  modified_base 6: mod_base = OTHER; note = 2'-O-methyladenosine
  modified_base 7: mod_base = OTHER; note = 2'-fluoroadenosine
  modified_base 8: mod_base = um
  modified_base 9: mod_base = gm
  modified_base 10: mod_base = OTHER; note = 2'-O-methyladenosine
  modified_base 11: mod_base = gm
  modified_base 12: mod_base = um
  modified_base 13: mod_base = cm
  modified_base 14: mod_base = OTHER; note = 2'-fluoroadenosine
  modified_base 15: mod_base = um
  modified_base 16: mod_base = OTHER; note = 2'-fluoroadenosine
  modified_base 17: mod_base = cm
  modified_base 18: mod_base = um
  modified_base 19: mod_base = cm
  modified_base 20: mod_base = OTHER; note = 2'-O-methyluridine with a 3'-phosphorothioate linkage
  modified_base 21: mod_base = OTHER; note = 2'-O-methyluridine with a 3'-phosphorothioate linkage
  modified_base 22: mod_base = OTHER; note = 2'-O-methylcytidine with a 3'-phosphorothioate linkage
  modified_base 23: mod_base = um
ttattaatgagtcatactcttct

SEQ ID NO: 471 - RNA, 23 nt, synthetic construct
  source 1..23: mol_type = other RNA
  modified_base 1: mod_base = OTHER; note = 2'-O-methyluridine with a 3'-phosphorothioate linkage
  modified_base 2: mod_base = OTHER; note = 2'-fluorouridine with a 3'-phosphorothioate linkage
  modified_base 3: mod_base = OTHER; note = 2'-O-methyladenosine
  modified_base 4: mod_base = gm
  modified_base 5: mod_base = OTHER; note = 2'-fluoroadenosine
  modified_base 6: mod_base = um
  modified_base 7: mod_base = OTHER; note = 2'-fluoroadenosine
  modified_base 8: mod_base = gm
  modified_base 9: mod_base = cm
  modified_base 10: mod_base = OTHER; note = 2'-O-methyladenosine
  modified_base 11: mod_base = um
  modified_base 12: mod_base = cm
  modified_base 13: mod_base = cm
  modified_base 14: mod_base = OTHER; note = 2'-fluorouridine
  modified_base 15: mod_base = um
  modified_base 16: mod_base = OTHER; note = 2'-fluoroguanosine
  modified_base 17: mod_base = OTHER; note = 2'-O-methyladenosine
  modified_base 18: mod_base = cm
  modified_base 19: mod_base = um
  modified_base 20: mod_base = OTHER; note = 2'-O-methyluridine with a 3'-phosphorothioate linkage
  modified_base 21: mod_base = OTHER; note = 2'-O-methylguanosine with a 3'-phosphorothioate linkage
  modified_base 22: mod_base = OTHER; note = 2'-O-methyladenosine with a 3'-phosphorothioate linkage
  modified_base 23: mod_base = OTHER; note = 2'-O-methyladenosine
ttagatagcatccttgacttgaa

SEQ ID NO: 472 - RNA, 23 nt, synthetic construct
  source 1..23: mol_type = other RNA
  modified_base 1: mod_base = OTHER; note = 2'-O-methyluridine with a 3'-phosphorothioate linkage
  modified_base 2: mod_base = OTHER; note = 2'-fluorouridine with a 3'-phosphorothioate linkage
  modified_base 3: mod_base = OTHER; note = 2'-O-methyladenosine
  modified_base 4: mod_base = OTHER; note = 2'-O-methyladenosine
  modified_base 5: mod_base = OTHER; note = 2'-fluoroguanosine
  modified_base 6: mod_base = um
  modified_base 7: mod_base = OTHER; note = 2'-fluorouridine
  modified_base 8: mod_base = um
  modified_base 9: mod_base = gm
  modified_base 10: mod_base = OTHER; note = 2'-O-methyladenosine
  modified_base 11: mod_base = OTHER; note = 2'-O-methyladenosine
  modified_base 12: mod_base = um
  modified_base 13: mod_base = gm
  modified_base 14: mod_base = OTHER; note = 2'-fluoroadenosine
  modified_base 15: mod_base = um
  modified_base 16: mod_base = OTHER; note = 2'-fluorouridine
  modified_base 17: mod_base = cm
  modified_base 18: mod_base = um
  modified_base 19: mod_base = um
  modified_base 20: mod_base = OTHER; note = 2'-O-methyluridine with a 3'-phosphorothioate linkage
  modified_base 21: mod_base = OTHER; note = 2'-O-methylcytidine with a 3'-phosphorothioate linkage
  modified_base 22: mod_base = OTHER; note = 2'-O-methylguanosine with a 3'-phosphorothioate linkage
  modified_base 23: mod_base = OTHER; note = 2'-O-methyladenosine
ttaagtttgaatgattctttcga

SEQ ID NO: 473 - RNA, 23 nt, synthetic construct
  source 1..23: mol_type = other RNA
  modified_base 1: mod_base = OTHER; note = 2'-O-methyluridine with a 3'-phosphorothioate linkage
  modified_base 2: mod_base = OTHER; note = 2'-fluorocytidine with a 3'-phosphorothioate linkage
  modified_base 3: mod_base = OTHER; note = 2'-O-methyladenosine
  modified_base 4: mod_base = um
  modified_base 5: mod_base = OTHER; note = 2'-fluoroadenosine
  modified_base 6: mod_base = OTHER; note = 2'-O-methyladenosine
  modified_base 7: mod_base = OTHER; note = 2'-fluoroguanosine
  modified_base 8: mod_base = um
  modified_base 9: mod_base = um
  modified_base 10: mod_base = um
  modified_base 11: mod_base = gm
  modified_base 12: mod_base = OTHER; note = 2'-O-methyladenosine
  modified_base 13: mod_base = OTHER; note = 2'-O-methyladenosine
  modified_base 14: mod_base = OTHER; note = 2'-fluorouridine
  modified_base 15: mod_base = gm
  modified_base 16: mod_base = OTHER; note = 2'-fluoroadenosine
  modified_base 17: mod_base = um
  modified_base 18: mod_base = um
  modified_base 19: mod_base = cm
  modified_base 20: mod_base = OTHER; note = 2'-O-methyluridine with a 3'-phosphorothioate linkage
  modified_base 21: mod_base = OTHER; note = 2'-O-methyluridine with a 3'-phosphorothioate linkage
  modified_base 22: mod_base = OTHER; note = 2'-O-methyluridine with a 3'-phosphorothioate linkage
  modified_base 23: mod_base = cm
tcataagtttgaatgattctttc

SEQ ID NO: 474 - RNA, 23 nt, synthetic construct
  source 1..23: mol_type = other RNA
  modified_base 1: mod_base = OTHER; note = 2'-O-methyluridine with a 3'-phosphorothioate linkage
  modified_base 2: mod_base = OTHER; note = 2'-fluorocytidine with a 3'-phosphorothioate linkage
  modified_base 3: mod_base = um
  modified_base 4: mod_base = um
  modified_base 5: mod_base = OTHER; note = 2'-fluoroguanosine
  modified_base 6: mod_base = OTHER; note = 2'-O-methyladenosine
  modified_base 7: mod_base = OTHER; note = 2'-fluoroadenosine
  modified_base 8: mod_base = OTHER; note = 2'-O-methyladenosine
  modified_base 9: mod_base = um
  modified_base 10: mod_base = OTHER; note = 2'-O-methyladenosine
  modified_base 11: mod_base = OTHER; note = 2'-O-methyladenosine
  modified_base 12: mod_base = gm
  modified_base 13: mod_base = gm
  modified_base 14: mod_base = OTHER; note = 2'-fluorouridine
  modified_base 15: mod_base = OTHER; note = 2'-O-methyladenosine
  modified_base 16: mod_base = OTHER; note = 2'-fluorouridine
  modified_base 17: mod_base = OTHER; note = 2'-O-methyladenosine
  modified_base 18: mod_base = cm
  modified_base 19: mod_base = OTHER; note = 2'-O-methyladenosine
  modified_base 20: mod_base = OTHER; note = 2'-O-methyluridine with a 3'-phosphorothioate linkage
  modified_base 21: mod_base = OTHER; note = 2'-O-methyladenosine with a 3'-phosphorothioate linkage
  modified_base 22: mod_base = OTHER; note = 2'-O-methyladenosine with a 3'-phosphorothioate linkage
  modified_base 23: mod_base = cm
tcttgaaataaggtatacataac

SEQ ID NO: 475 - RNA, 23 nt, synthetic construct
  source 1..23: mol_type = other RNA
  modified_base 1: mod_base = OTHER; note = 2'-O-methyluridine with a 3'-phosphorothioate linkage
  modified_base 2: mod_base = OTHER; note = 2'-fluorouridine with a 3'-phosphorothioate linkage
  modified_base 3: mod_base = um
  modified_base 4: mod_base = cm
  modified_base 5: mod_base = OTHER; note = 2'-fluoroguanosine
  modified_base 6: mod_base = OTHER; note = 2'-O-methyladenosine
  modified_base 7: mod_base = OTHER; note = 2'-fluoroadenosine
  modified_base 8: mod_base = gm
  modified_base 9: mod_base = OTHER; note = 2'-O-methyladenosine
  modified_base 10: mod_base = OTHER; note = 2'-O-methyladenosine
  modified_base 11: mod_base = OTHER; note = 2'-O-methyladenosine
  modified_base 12: mod_base = um
  modified_base 13: mod_base = OTHER; note = 2'-O-methyladenosine
  modified_base 14: mod_base = OTHER; note = 2'-fluorouridine
  modified_base 15: mod_base = OTHER; note = 2'-O-methyladenosine
  modified_base 16: mod_base = OTHER; note = 2'-fluoroadenosine
  modified_base 17: mod_base = gm
  modified_base 18: mod_base = cm
  modified_base 19: mod_base = OTHER; note = 2'-O-methyladenosine
  modified_base 20: mod_base = OTHER; note = 2'-O-methyladenosine with a 3'-phosphorothioate linkage
  modified_base 21: mod_base = OTHER; note = 2'-O-methyluridine with a 3'-phosphorothioate linkage
  modified_base 22: mod_base = OTHER; note = 2'-O-methyluridine with a 3'-phosphorothioate linkage
  modified_base 23: mod_base = cm
tttcgaagaaatataagcaattc

SEQ ID NO: 476 - RNA, 23 nt, synthetic construct
  source 1..23: mol_type = other RNA
  modified_base 1: mod_base = OTHER; note = 2'-O-methyluridine with a 3'-phosphorothioate linkage
  modified_base 2: mod_base = OTHER; note = 2'-fluoroadenosine with a 3'-phosphorothioate linkage
  modified_base 3: mod_base = um
  modified_base 4: mod_base = OTHER; note = 2'-O-methyladenosine
  modified_base 5: mod_base = OTHER; note = 2'-fluoroadenosine
  modified_base 6: mod_base = OTHER; note = 2'-O-methyladenosine
  modified_base 7: mod_base = OTHER; note = 2'-fluoroadenosine
  modified_base 8: mod_base = gm
  modified_base 9: mod_base = OTHER; note = 2'-O-methyladenosine
  modified_base 10: mod_base = um
  modified_base 11: mod_base = um
  modified_base 12: mod_base = cm
  modified_base 13: mod_base = um
  modified_base 14: mod_base = OTHER; note = 2'-fluorouridine
  modified_base 15: mod_base = gm
  modified_base 16: mod_base = OTHER; note = 2'-fluoroguanosine
  modified_base 17: mod_base = OTHER; note = 2'-O-methyladenosine
  modified_base 18: mod_base = gm
  modified_base 19: mod_base = um
  modified_base 20: mod_base = OTHER; note = 2'-O-methyluridine with a 3'-phosphorothioate linkage
  modified_base 21: mod_base = OTHER; note = 2'-O-methyluridine with a 3'-phosphorothioate linkage
  modified_base 22: mod_base = OTHER; note = 2'-O-methyluridine with a 3'-phosphorothioate linkage
  modified_base 23: mod_base = gm
tataaaagattcttggagttttg

SEQ ID NO: 477 - RNA, 23 nt, synthetic construct
  source 1..23: mol_type = other RNA
  modified_base 1: mod_base = OTHER; note = 2'-O-methyluridine with a 3'-phosphorothioate linkage
  modified_base 2: mod_base = OTHER; note = 2'-fluoroguanosine with a 3'-phosphorothioate linkage
  modified_base 3: mod_base = OTHER; note = 2'-O-methyladenosine
  modified_base 4: mod_base = gm
  modified_base 5: mod_base = OTHER; note = 2'-fluoroadenosine
  modified_base 6: mod_base = OTHER; note = 2'-O-methyladenosine
  modified_base 7: mod_base = OTHER; note = 2'-fluoroadenosine
  modified_base 8: mod_base = OTHER; note = 2'-O-methyladenosine
  modified_base 9: mod_base = um
  modified_base 10: mod_base = gm
  modified_base 11: mod_base = um
  modified_base 12: mod_base = um
  modified_base 13: mod_base = um
  modified_base 14: mod_base = OTHER; note = 2'-fluorouridine
  modified_base 15: mod_base = cm
  modified_base 16: mod_base = OTHER; note = 2'-fluorouridine
  modified_base 17: mod_base = um
  modified_base 18: mod_base = cm
  modified_base 19: mod_base = um
  modified_base 20: mod_base = OTHER; note = 2'-O-methyluridine with a 3'-phosphorothioate linkage
  modified_base 21: mod_base = OTHER; note = 2'-O-methylcytidine with a 3'-phosphorothioate linkage
  modified_base 22: mod_base = OTHER; note = 2'-O-methyladenosine with a 3'-phosphorothioate linkage
  modified_base 23: mod_base = cm
tgagaaaatgttttcttcttcac

SEQ ID NO: 478 - RNA, 23 nt, synthetic construct
  source 1..23: mol_type = other RNA
  modified_base 1: mod_base = OTHER; note = 2'-O-methyluridine with a 3'-phosphorothioate linkage
  modified_base 2: mod_base = OTHER; note = 2'-fluorouridine with a 3'-phosphorothioate linkage
  modified_base 3: mod_base = um
  modified_base 4: mod_base = um
  modified_base 5: mod_base = OTHER; note = 2'-fluoroadenosine
  modified_base 6: mod_base = cm
  modified_base 7: mod_base = OTHER; note = 2'-fluoroadenosine
  modified_base 8: mod_base = um
  modified_base 9: mod_base = um
  modified_base 10: mod_base = um
  modified_base 11: mod_base = um
  modified_base 12: mod_base = um
  modified_base 13: mod_base = cm
  modified_base 14: mod_base = OTHER; note = 2'-fluorouridine
  modified_base 15: mod_base = um
  modified_base 16: mod_base = OTHER; note = 2'-fluorocytidine
  modified_base 17: mod_base = um
  modified_base 18: mod_base = um
  modified_base 19: mod_base = cm
  modified_base 20: mod_base = OTHER; note = 2'-O-methylcytidine with a 3'-phosphorothioate linkage
  modified_base 21: mod_base = OTHER; note = 2'-O-methyluridine with a 3'-phosphorothioate linkage
  modified_base 22: mod_base = OTHER; note = 2'-O-methylcytidine with a 3'-phosphorothioate linkage
  modified_base 23: mod_base = um
ttttacatttttcttcttcctct

SEQ ID NO: 479 - RNA, 23 nt, synthetic construct
  source 1..23: mol_type = other RNA
  modified_base 1: mod_base = OTHER; note = 2'-O-methyluridine with a 3'-phosphorothioate linkage
  modified_base 2: mod_base = OTHER; note = 2'-fluoroguanosine with a 3'-phosphorothioate linkage
  modified_base 3: mod_base = OTHER; note = 2'-O-methyladenosine
  modified_base 4: mod_base = um
  modified_base 5: mod_base = OTHER; note = 2'-fluoroadenosine
  modified_base 6: mod_base = OTHER; note = 2'-O-methyladenosine
  modified_base 7: mod_base = OTHER; note = 2'-fluoroadenosine
  modified_base 8: mod_base = OTHER; note = 2'-O-methyladenosine
  modified_base 9: mod_base = gm
  modified_base 10: mod_base = OTHER; note = 2'-O-methyladenosine
  modified_base 11: mod_base = um
  modified_base 12: mod_base = um
  modified_base 13: mod_base = cm
  modified_base 14: mod_base = OTHER; note = 2'-fluorouridine
  modified_base 15: mod_base = um
  modified_base 16: mod_base = OTHER; note = 2'-fluoroguanosine
  modified_base 17: mod_base = gm
  modified_base 18: mod_base = OTHER; note = 2'-O-methyladenosine
  modified_base 19: mod_base = gm
  modified_base 20: mod_base = OTHER; note = 2'-O-methyluridine with a 3'-phosphorothioate linkage
  modified_base 21: mod_base = OTHER; note = 2'-O-methyluridine with a 3'-phosphorothioate linkage
  modified_base 22: mod_base = OTHER; note = 2'-O-methylguanosine with a 3'-phosphorothioate linkage
  modified_base 23: mod_base = gm
tgataaaagattcttggagttgg

SEQ ID NO: 480 - RNA, 23 nt, synthetic construct
  source 1..23: mol_type = other RNA
  modified_base 1: mod_base = OTHER; note = 2'-O-methyluridine with a 3'-phosphorothioate linkage
  modified_base 2: mod_base = OTHER; note = 2'-fluoroguanosine with a 3'-phosphorothioate linkage
  modified_base 3: mod_base = OTHER; note = 2'-O-methyladenosine
  modified_base 4: mod_base = um
  modified_base 5: mod_base = OTHER; note = 2'-fluoroadenosine
  modified_base 6: mod_base = OTHER; note = 2'-O-methyladenosine
  modified_base 7: mod_base = OTHER; note = 2'-fluoroadenosine
  modified_base 8: mod_base = OTHER; note = 2'-O-methyladenosine
  modified_base 9: mod_base = gm
  modified_base 10: mod_base = OTHER; note = 2'-O-methyladenosine
  modified_base 11: mod_base = um
  modified_base 12: mod_base = um
  modified_base 13: mod_base = cm
  modified_base 14: mod_base = OTHER; note = 2'-fluorouridine
  modified_base 15: mod_base = um
  modified_base 16: mod_base = OTHER; note = 2'-fluoroguanosine
  modified_base 17: mod_base = gm
  modified_base 18: mod_base = OTHER; note = 2'-O-methyladenosine
  modified_base 19: mod_base = gm
  modified_base 20: mod_base = OTHER; note = 2'-O-methyluridine with a 3'-phosphorothioate linkage
  modified_base 21: mod_base = OTHER; note = 2'-O-methyluridine with a 3'-phosphorothioate linkage
  modified_base 22: mod_base = OTHER; note = 2'-O-methyluridine with a 3'-phosphorothioate linkage
  modified_base 23: mod_base = um
tgataaaagattcttggagtttt

SEQ ID NO: 481 - RNA, 23 nt, synthetic construct
  source 1..23: mol_type = other RNA
  modified_base 1: mod_base = OTHER; note = 2'-O-methyluridine with a 3'-phosphorothioate linkage
  modified_base 2: mod_base = OTHER; note = 2'-fluorouridine with a 3'-phosphorothioate linkage
  modified_base 3: mod_base = um
  modified_base 4: mod_base = um
  modified_base 5: mod_base = OTHER; note = 2'-fluorocytidine
  modified_base 6: mod_base = um
  modified_base 7: mod_base = OTHER; note = 2'-fluoroadenosine
  modified_base 8: mod_base = cm
  modified_base 9: mod_base = OTHER; note = 2'-O-methyladenosine
  modified_base 10: mod_base = OTHER; note = 2'-O-methyladenosine
  modified_base 11: mod_base = gm
  modified_base 12: mod_base = um
  modified_base 13: mod_base = um
  modified_base 14: mod_base = OTHER; note = 2'-fluorocytidine
  modified_base 15: mod_base = OTHER; note = 2'-O-methyladenosine
  modified_base 16: mod_base = OTHER; note = 2'-fluoroadenosine
  modified_base 17: mod_base = OTHER; note = 2'-O-methyladenosine
  modified_base 18: mod_base = OTHER; note = 2'-O-methyladenosine
  modified_base 19: mod_base = OTHER; note = 2'-O-methyladenosine
  modified_base 20: mod_base = OTHER; note = 2'-O-methyluridine with a 3'-phosphorothioate linkage
  modified_base 21: mod_base = OTHER; note = 2'-O-methyluridine with a 3'-phosphorothioate linkage
  modified_base 22: mod_base = OTHER; note = 2'-O-methylguanosine with a 3'-phosphorothioate linkage
  modified_base 23: mod_base = gm
ttttctacaagttcaaaaattgg

SEQ ID NO: 482 - RNA, 23 nt, synthetic construct
  source 1..23: mol_type = other RNA
  modified_base 1: mod_base = OTHER; note = 2'-O-methyluridine with a 3'-phosphorothioate linkage
  modified_base 2: mod_base = OTHER; note = 2'-fluoroadenosine with a 3'-phosphorothioate linkage
  modified_base 3: mod_base = um
  modified_base 4: mod_base = OTHER; note = 2'-O-methyladenosine
  modified_base 5: mod_base = OTHER; note = 2'-fluoroadenosine
  modified_base 6: mod_base = gm
  modified_base 7: mod_base = OTHER; note = 2'-fluoroguanosine
  modified_base 8: mod_base = OTHER; note = 2'-O-methyladenosine
  modified_base 9: mod_base = OTHER; note = 2'-O-methyladenosine
  modified_base 10: mod_base = um
  modified_base 11: mod_base = gm
  modified_base 12: mod_base = um
  modified_base 13: mod_base = cm
  modified_base 14: mod_base = OTHER; note = 2'-fluorouridine
  modified_base 15: mod_base = cm
  modified_base 16: mod_base = OTHER; note = 2'-fluoroguanosine
  modified_base 17: mod_base = OTHER; note = 2'-O-methyladenosine
  modified_base 18: mod_base = um
  modified_base 19: mod_base = OTHER; note = 2'-O-methyladenosine
  modified_base 20: mod_base = OTHER; note = 2'-O-methylguanosine with a 3'-phosphorothioate linkage
  modified_base 21: mod_base = OTHER; note = 2'-O-methylcytidine with a 3'-phosphorothioate linkage
  modified_base 22: mod_base = OTHER; note = 2'-O-methylcytidine with a 3'-phosphorothioate linkage
  modified_base 23: mod_base = OTHER; note = 2'-O-methyladenosine
tataaggaatgtctcgatagcca

SEQ ID NO: 483 - RNA, 23 nt, synthetic construct
  source 1..23: mol_type = other RNA
  modified_base 1: mod_base = OTHER; note = 2'-O-methyluridine with a 3'-phosphorothioate linkage
  modified_base 2: mod_base = OTHER; note = 2'-fluoroadenosine with a 3'-phosphorothioate linkage
  modified_base 3: mod_base = um
  modified_base 4: mod_base = gm
  modified_base 5: mod_base = OTHER; note = 2'-fluoroguanosine
  modified_base 6: mod_base = gm
  modified_base 7: mod_base = OTHER; note = 2'-fluorouridine
  modified_base 8: mod_base = gm
  modified_base 9: mod_base = OTHER; note = 2'-O-methyladenosine
  modified_base 10: mod_base = um
  modified_base 11: mod_base = cm
  modified_base 12: mod_base = gm
  modified_base 13: mod_base = OTHER; note = 2'-O-methyladenosine
  modified_base 14: mod_base = OTHER; note = 2'-fluorouridine
  modified_base 15: mod_base = um
  modified_base 16: mod_base = OTHER; note = 2'-fluoroadenosine
  modified_base 17: mod_base = gm
  modified_base 18: mod_base = um
  modified_base 19: mod_base = um
  modified_base 20: mod_base = OTHER; note = 2'-O-methyladenosine with a 3'-phosphorothioate linkage
  modified_base 21: mod_base = OTHER; note = 2'-O-methylguanosine with a 3'-phosphorothioate linkage
  modified_base 22: mod_base = OTHER; note = 2'-O-methyladenosine with a 3'-phosphorothioate linkage
  modified_base 23: mod_base = gm
tatgggtgatcgattagttagag

SEQ ID NO: 484 - RNA, 23 nt, synthetic construct
  source 1..23: mol_type = other RNA
  modified_base 1: mod_base = OTHER; note = 2'-O-methyluridine with a 3'-phosphorothioate linkage
  modified_base 2: mod_base = OTHER; note = 2'-fluoroadenosine with a 3'-phosphorothioate linkage
  modified_base 3: mod_base = um
  modified_base 4: mod_base = OTHER; note = 2'-O-methyladenosine
  modified_base 5: mod_base = OTHER; note = 2'-fluorouridine
  modified_base 6: mod_base = um
  modified_base 7: mod_base = OTHER; note = 2'-fluorouridine
  modified_base 8: mod_base = um
  modified_base 9: mod_base = gm
  modified_base 10: mod_base = cm
  modified_base 11: mod_base = OTHER; note = 2'-O-methyladenosine
  modified_base 12: mod_base = OTHER; note = 2'-O-methyladenosine
  modified_base 13: mod_base = cm
  modified_base 14: mod_base = OTHER; note = 2'-fluorouridine
  modified_base 15: mod_base = gm
  modified_base 16: mod_base = OTHER; note = 2'-fluorocytidine
  modified_base 17: mod_base = cm
  modified_base 18: mod_base = OTHER; note = 2'-O-methyladenosine
  modified_base 19: mod_base = um
  modified_base 20: mod_base = OTHER; note = 2'-O-methyladenosine
  modified_base 21: mod_base = OTHER; note = 2'-O-methylguanosine with a 3'-phosphorothioate linkage
  modified_base 22: mod_base = OTHER; note = 2'-O-methyluridine with a 3'-phosphorothioate linkage
  modified_base 23: mod_base = OTHER; note = 2'-O-methyladenosine
tatattttgcaactgccatagta

SEQ ID NO: 485 - RNA, 23 nt, synthetic construct
  source 1..23: mol_type = other RNA
  modified_base 1: mod_base = OTHER; note = 2'-O-methyluridine with a 3'-phosphorothioate linkage
  modified_base 2: mod_base = OTHER; note = 2'-fluoroadenosine with a 3'-phosphorothioate linkage
  modified_base 3: mod_base = OTHER; note = 2'-O-methyladenosine
  modified_base 4: mod_base = um
  modified_base 5: mod_base = OTHER; note = 2'-fluoroadenosine
  modified_base 6: mod_base = um
  modified_base 7: mod_base = OTHER; note = 2'-fluorouridine
  modified_base 8: mod_base = um
  modified_base 9: mod_base = um
  modified_base 10: mod_base = gm
  modified_base 11: mod_base = cm
  modified_base 12: mod_base = OTHER; note = 2'-O-methyladenosine
  modified_base 13: mod_base = OTHER; note = 2'-O-methyladenosine
  modified_base 14: mod_base = OTHER; note = 2'-fluorocytidine
  modified_base 15: mod_base = um
  modified_base 16: mod_base = OTHER; note = 2'-fluoroguanosine
  modified_base 17: mod_base = cm
  modified_base 18: mod_base = cm
  modified_base 19: mod_base = OTHER; note = 2'-O-methyladenosine
  modified_base 20: mod_base = um
  modified_base 21: mod_base = OTHER; note = 2'-O-methyladenosine with a 3'-phosphorothioate linkage
  modified_base 22: mod_base = OTHER; note = 2'-O-methylguanosine with a 3'-phosphorothioate linkage
  modified_base 23: mod_base = um
taatattttgcaactgccatagt

SEQ ID NO: 486 - RNA, 23 nt, synthetic construct
  source 1..23: mol_type = other RNA
  modified_base 1: mod_base = OTHER; note = 2'-O-methyluridine with a 3'-phosphorothioate linkage
  modified_base 2: mod_base = OTHER; note = 2'-fluoroguanosine with a 3'-phosphorothioate linkage
  modified_base 3: mod_base = OTHER; note = 2'-O-methyladenosine
  modified_base 4: mod_base = OTHER; note = 2'-O-methyladenosine
  modified_base 5: mod_base = OTHER; note = 2'-fluorouridine
  modified_base 6: mod_base = OTHER; note = 2'-O-methyladenosine
  modified_base 7: mod_base = OTHER; note = 2'-fluorouridine
  modified_base 8: mod_base = um
  modified_base 9: mod_base = um
  modified_base 10: mod_base = um
  modified_base 11: mod_base = gm
  modified_base 12: mod_base = cm
  modified_base 13: mod_base = OTHER; note = 2'-O-methyladenosine
  modified_base 14: mod_base = OTHER; note = 2'-fluoroadenosine
  modified_base 15: mod_base = cm
  modified_base 16: mod_base = OTHER; note = 2'-fluorouridine
  modified_base 17: mod_base = gm
  modified_base 18: mod_base = cm
  modified_base 19: mod_base = cm
  modified_base 20: mod_base = OTHER; note = 2'-O-methyladenosine
  modified_base 21: mod_base = OTHER; note = 2'-O-methyluridine with a 3'-phosphorothioate linkage
  modified_base 22: mod_base = OTHER; note = 2'-O-methyladenosine with a 3'-phosphorothioate linkage
  modified_base 23: mod_base = gm
tgaatattttgcaactgccatag

SEQ ID NO: 487 - RNA, 23 nt, synthetic construct
  source 1..23: mol_type = other RNA
  modified_base 1: mod_base = OTHER; note = 2'-O-methyluridine with a 3'-phosphorothioate linkage
  modified_base 2: mod_base = OTHER; note = 2'-fluorocytidine with a 3'-phosphorothioate linkage
  modified_base 3: mod_base = um
  modified_base 4: mod_base = gm
  modified_base 5: mod_base = OTHER; note = 2'-fluoroadenosine
  modified_base 6: mod_base = OTHER; note = 2'-O-methyladenosine
  modified_base 7: mod_base = OTHER; note = 2'-fluorouridine
  modified_base 8: mod_base = OTHER; note = 2'-O-methyladenosine
  modified_base 9: mod_base = um
  modified_base 10: mod_base = um
  modified_base 11: mod_base = um
  modified_base 12: mod_base = um
  modified_base 13: mod_base = gm
  modified_base 14: mod_base = OTHER; note = 2'-fluorocytidine
  modified_base 15: mod_base = OTHER; note = 2'-O-methyladenosine
  modified_base 16: mod_base = OTHER; note = 2'-fluoroadenosine
  modified_base 17: mod_base = cm
  modified_base 18: mod_base = um
  modified_base 19: mod_base = gm
  modified_base 20: mod_base = cm
  modified_base 21: mod_base = OTHER; note = 2'-O-methylcytidine with a 3'-phosphorothioate linkage
  modified_base 22: mod_base = OTHER; note = 2'-O-methyladenosine with a 3'-phosphorothioate linkage
  modified_base 23: mod_base = um
tctgaatattttgcaactgccat

SEQ ID NO: 488 - RNA, 23 nt, synthetic construct
  source 1..23: mol_type = other RNA
  modified_base 1: mod_base = OTHER; note = 2'-O-methyluridine with a 3'-phosphorothioate linkage
  modified_base 2: mod_base = OTHER; note = 2'-fluorocytidine with a 3'-phosphorothioate linkage
  modified_base 3: mod_base = cm
  modified_base 4: mod_base = um
  modified_base 5: mod_base = OTHER; note = 2'-fluoroguanosine
  modified_base 6: mod_base = OTHER; note = 2'-O-methyladenosine
  modified_base 7: mod_base = OTHER; note = 2'-fluoroadenosine
  modified_base 8: mod_base = um
  modified_base 9: mod_base = OTHER; note = 2'-O-methyladenosine
  modified_base 10: mod_base = um
  modified_base 11: mod_base = um
  modified_base 12: mod_base = um
  modified_base 13: mod_base = um
  modified_base 14: mod_base = OTHER; note = 2'-fluoroguanosine
  modified_base 15: mod_base = cm
  modified_base 16: mod_base = OTHER; note = 2'-fluoroadenosine
  modified_base 17: mod_base = OTHER; note = 2'-O-methyladenosine
  modified_base 18: mod_base = cm
  modified_base 19: mod_base = um
  modified_base 20: mod_base = gm
  modified_base 21: mod_base = OTHER; note = 2'-O-methylcytidine with a 3'-phosphorothioate linkage
  modified_base 22: mod_base = OTHER; note = 2'-O-methylcytidine with a 3'-phosphorothioate linkage
  modified_base 23: mod_base = OTHER; note = 2'-O-methyladenosine
tcctgaatattttgcaactgcca

SEQ ID NO: 489 - RNA, 23 nt, synthetic construct
  source 1..23: mol_type = other RNA
  modified_base 1: mod_base = OTHER; note = 2'-O-methyluridine with a 3'-phosphorothioate linkage
  modified_base 2: mod_base = OTHER; note = 2'-fluorouridine with a 3'-phosphorothioate linkage
  modified_base 3: mod_base = OTHER; note = 2'-O-methyladenosine
  modified_base 4: mod_base = OTHER; note = 2'-O-methyladenosine
  modified_base 5: mod_base = OTHER; note = 2'-fluorouridine
  modified_base 6: mod_base = gm
  modified_base 7: mod_base = OTHER; note = 2'-fluoroadenosine
  modified_base 8: mod_base = gm
  modified_base 9: mod_base = gm
  modified_base 10: mod_base = cm
  modified_base 11: mod_base = um
  modified_base 12: mod_base = um
  modified_base 13: mod_base = OTHER; note = 2'-O-methyladenosine
  modified_base 14: mod_base = OTHER; note = 2'-fluorouridine
  modified_base 15: mod_base = OTHER; note = 2'-O-methyladenosine
  modified_base 16: mod_base = OTHER; note = 2'-fluorocytidine
  modified_base 17: mod_base = cm
  modified_base 18: mod_base = OTHER; note = 2'-O-methyladenosine
  modified_base 19: mod_base = um
  modified_base 20: mod_base = um
  modified_base 21: mod_base = OTHER; note = 2'-O-methylguanosine with a 3'-phosphorothioate linkage
  modified_base 22: mod_base = OTHER; note = 2'-O-methyluridine with a 3'-phosphorothioate linkage
  modified_base 23: mod_base = um
ttaatgaggcttataccattgtt

SEQ ID NO: 490 - RNA, 23 nt, synthetic construct
  source 1..23: mol_type = other RNA
  modified_base 1: mod_base = OTHER; note = 2'-O-methyluridine with a 3'-phosphorothioate linkage
  modified_base 2: mod_base = OTHER; note = 2'-fluoroguanosine with a 3'-phosphorothioate linkage
  modified_base 3: mod_base = OTHER; note = 2'-O-methyladenosine
  modified_base 4: mod_base = um
  modified_base 5: mod_base = OTHER; note = 2'-fluoroadenosine
  modified_base 6: mod_base = OTHER; note = 2'-O-methyladenosine
  modified_base 7: mod_base = OTHER; note = 2'-fluorouridine
  modified_base 8: mod_base = gm
  modified_base 9: mod_base = OTHER; note = 2'-O-methyladenosine
  modified_base 10: mod_base = gm
  modified_base 11: mod_base = gm
  modified_base 12: mod_base = cm
  modified_base 13: mod_base = um
  modified_base 14: mod_base = OTHER; note = 2'-fluorouridine
  modified_base 15: mod_base = OTHER; note = 2'-O-methyladenosine
  modified_base 16: mod_base = OTHER; note = 2'-fluorouridine
  modified_base 17: mod_base = OTHER; note = 2'-O-methyladenosine
  modified_base 18: mod_base = cm
  modified_base 19: mod_base = cm
  modified_base 20: mod_base = OTHER; note = 2'-O-methyladenosine
  modified_base 21: mod_base = OTHER; note = 2'-O-methyluridine with a 3'-phosphorothioate linkage
  modified_base 22: mod_base = OTHER; note = 2'-O-methyluridine with a 3'-phosphorothioate linkage
  modified_base 23: mod_base = gm
tgataatgaggcttataccattg

SEQ ID NO: 491 - RNA, 23 nt, synthetic construct
  source 1..23: mol_type = other RNA
  modified_base 1: mod_base = OTHER; note = 2'-O-methyluridine with a 3'-phosphorothioate linkage
  modified_base 2: mod_base = OTHER; note = 2'-fluorouridine with a 3'-phosphorothioate linkage
  modified_base 3: mod_base = um
  modified_base 4: mod_base = um
  modified_base 5: mod_base = OTHER; note = 2'-fluoroguanosine
  modified_base 6: mod_base = OTHER; note = 2'-O-methyladenosine
  modified_base 7: mod_base = OTHER; note = 2'-fluorouridine
  modified_base 8: mod_base = OTHER; note = 2'-O-methyladenosine
  modified_base 9: mod_base = OTHER; note = 2'-O-methyladenosine
  modified_base 10: mod_base = um
  modified_base 11: mod_base = gm
  modified_base 12: mod_base = OTHER; note = 2'-O-methyladenosine
  modified_base 13: mod_base = gm
  modified_base 14: mod_base = OTHER; note = 2'-fluoroguanosine
  modified_base 15: mod_base = cm
  modified_base 16: mod_base = OTHER; note = 2'-fluorouridine
  modified_base 17: mod_base = um
  modified_base 18: mod_base = OTHER; note = 2'-O-methyladenosine
  modified_base 19: mod_base = um
  modified_base 20: mod_base = OTHER; note = 2'-O-methyladenosine
  modified_base 21: mod_base = OTHER; note = 2'-O-methylcytidine with a 3'-phosphorothioate linkage
  modified_base 22: mod_base = OTHER; note = 2'-O-methylcytidine with a 3'-phosphorothioate linkage
  modified_base 23: mod_base = OTHER; note = 2'-O-methyladenosine
ttttgataatgaggcttatacca

SEQ ID NO: 492 - RNA, 23 nt, synthetic construct
  source 1..23: mol_type = other RNA
  modified_base 1: mod_base = OTHER; note = 2'-O-methyluridine with a 3'-phosphorothioate linkage
  modified_base 2: mod_base = OTHER; note = 2'-fluorouridine with a 3'-phosphorothioate linkage
  modified_base 3: mod_base = um
  modified_base 4: mod_base = um
  modified_base 5: mod_base = OTHER; note = 2'-fluorouridine
  modified_base 6: mod_base = gm
  modified_base 7: mod_base = OTHER; note = 2'-fluoroadenosine
  modified_base 8: mod_base = um
  modified_base 9: mod_base = OTHER; note = 2'-O-methyladenosine
  modified_base 10: mod_base = OTHER; note = 2'-O-methyladenosine
  modified_base 11: mod_base = um
  modified_base 12: mod_base = gm
  modified_base 13: mod_base = OTHER; note = 2'-O-methyladenosine
  modified_base 14: mod_base = OTHER; note = 2'-fluoroguanosine
  modified_base 15: mod_base = gm
  modified_base 16: mod_base = OTHER; note = 2'-fluorocytidine
  modified_base 17: mod_base = um
  modified_base 18: mod_base = um
  modified_base 19: mod_base = OTHER; note = 2'-O-methyladenosine
  modified_base 20: mod_base = um
  modified_base 21: mod_base = OTHER; note = 2'-O-methyladenosine with a 3'-phosphorothioate linkage
  modified_base 22: mod_base = OTHER; note = 2'-O-methylcytidine with a 3'-phosphorothioate linkage
  modified_base 23: mod_base = cm
tttttgataatgaggcttatacc

SEQ ID NO: 493 - RNA, 23 nt, synthetic construct
  source 1..23: mol_type = other RNA
  modified_base 1: mod_base = OTHER; note = 2'-O-methyluridine with a 3'-phosphorothioate linkage
  modified_base 2: mod_base = OTHER; note = 2'-fluorocytidine with a 3'-phosphorothioate linkage
  modified_base 3: mod_base = um
  modified_base 4: mod_base = OTHER; note = 2'-O-methyladenosine
  modified_base 5: mod_base = OTHER; note = 2'-fluorouridine
  modified_base 6: mod_base = um
  modified_base 7: mod_base = OTHER; note = 2'-fluorocytidine
  modified_base 8: mod_base = cm
  modified_base 9: mod_base = um
  modified_base 10: mod_base = OTHER; note = 2'-O-methyladenosine
  modified_base 11: mod_base = um
  modified_base 12: mod_base = um
  modified_base 13: mod_base = um
  modified_base 14: mod_base = OTHER; note = 2'-fluoroadenosine
  modified_base 15: mod_base = gm
  modified_base 16: mod_base = OTHER; note = 2'-fluorouridine
  modified_base 17: mod_base = cm
  modified_base 18: mod_base = cm
  modified_base 19: mod_base = cm
  modified_base 20: mod_base = um
  modified_base 21: mod_base = OTHER; note = 2'-O-methyluridine with a 3'-phosphorothioate linkage
  modified_base 22: mod_base = OTHER; note = 2'-O-methylguanosine with a 3'-phosphorothioate linkage
  modified_base 23: mod_base = um
tctattcctatttagtcccttgt

SEQ ID NO: 494 - RNA, 23 nt, synthetic construct
  source 1..23: mol_type = other RNA
  modified_base 1: mod_base = OTHER; note = 2'-O-methyluridine with a 3'-phosphorothioate linkage
  modified_base 2: mod_base = OTHER; note = 2'-fluoroadenosine with a 3'-phosphorothioate linkage
  modified_base 3: mod_base = OTHER; note = 2'-O-methyladenosine
  modified_base 4: mod_base = cm
  modified_base 5: mod_base = OTHER; note = 2'-fluorouridine
  modified_base 6: mod_base = OTHER; note = 2'-O-methyladenosine
  modified_base 7: mod_base = OTHER; note = 2'-fluorouridine
  modified_base 8: mod_base = um
  modified_base 9: mod_base = cm
  modified_base 10: mod_base = cm
  modified_base 11: mod_base = um
  modified_base 12: mod_base = OTHER; note = 2'-O-methyladenosine
  modified_base 13: mod_base = um
  modified_base 14: mod_base = OTHER; note = 2'-fluorouridine
  modified_base 15: mod_base = um
  modified_base 16: mod_base = OTHER; note = 2'-fluoroadenosine
  modified_base 17: mod_base = gm
  modified_base 18: mod_base = um
  modified_base 19: mod_base = cm
  modified_base 20: mod_base = cm
  modified_base 21: mod_base = OTHER; note = 2'-O-methylcytidine with a 3'-phosphorothioate linkage
  modified_base 22: mod_base = OTHER; note = 2'-O-methyluridine with a 3'-phosphorothioate linkage
  modified_base 23: mod_base = um
taactattcctatttagtccctt

SEQ ID NO: 495 - RNA, 23 nt, synthetic construct
  source 1..23: mol_type = other RNA
  modified_base 1: mod_base = OTHER; note = 2'-O-methyluridine with a 3'-phosphorothioate linkage
  modified_base 2: mod_base = OTHER; note = 2'-fluorouridine with a 3'-phosphorothioate linkage
  modified_base 3: mod_base = gm
  modified_base 4: mod_base = OTHER; note = 2'-O-methyladenosine
  modified_base 5: mod_base = OTHER; note = 2'-fluorouridine
  modified_base 6: mod_base = OTHER; note = 2'-O-methyladenosine
  modified_base 7: mod_base = OTHER; note = 2'-fluorocytidine
  modified_base 8: mod_base = OTHER; note = 2'-O-methyladenosine
  modified_base 9: mod_base = gm
  modified_base 10: mod_base = OTHER; note = 2'-O-methyladenosine
  modified_base 11: mod_base = OTHER; note = 2'-O-methyladenosine
  modified_base 12: mod_base = gm
  modified_base 13: mod_base = OTHER; note = 2'-O-methyladenosine
  modified_base 14: mod_base = OTHER; note = 2'-fluorouridine
  modified_base 15: mod_base = gm
  modified_base 16: mod_base = OTHER; note = 2'-fluoroadenosine
  modified_base 17: mod_base = cm
  modified_base 18: mod_base = cm
  modified_base 19: mod_base = um
  modified_base 20: mod_base = um
  modified_base 21: mod_base = OTHER; note = 2'-O-methyluridine with a 3'-phosphorothioate linkage
  modified_base 22: mod_base = OTHER; note = 2'-O-methylguanosine with a 3'-phosphorothioate linkage
  modified_base 23: mod_base = cm
ttgatacagaagatgacctttgc

SEQ ID NO: 496 - RNA, 23 nt, synthetic construct
  source 1..23: mol_type = other RNA
  modified_base 1: mod_base = OTHER; note = 2'-O-methyluridine with a 3'-phosphorothioate linkage
  modified_base 2: mod_base = OTHER; note = 2'-fluoroadenosine with a 3'-phosphorothioate linkage
  modified_base 3: mod_base = OTHER; note = 2'-O-methyladenosine
  modified_base 4: mod_base = OTHER; note = 2'-O-methyladenosine
  modified_base 5: mod_base = OTHER; note = 2'-fluoroadenosine
  modified_base 6: mod_base = um
  modified_base 7: mod_base = OTHER; note = 2'-fluorocytidine
  modified_base 8: mod_base = OTHER; note = 2'-O-methyladenosine
  modified_base 9: mod_base = gm
  modified_base 10: mod_base = cm
  modified_base 11: mod_base = OTHER; note = 2'-O-methyladenosine
  modified_base 12: mod_base = gm
  modified_base 13: mod_base = um
  modified_base 14: mod_base = OTHER; note = 2'-fluoroadenosine
  modified_base 15: mod_base = um
  modified_base 16: mod_base = OTHER; note = 2'-fluorocytidine
  modified_base 17: mod_base = OTHER; note = 2'-O-methyladenosine
  modified_base 18: mod_base = gm
  modified_base 19: mod_base = gm
  modified_base 20: mod_base = OTHER; note = 2'-O-methyladenosine
  modified_base 21: mod_base = OTHER; note = 2'-O-methyladenosine with a 3'-phosphorothioate linkage
  modified_base 22: mod_base = OTHER; note = 2'-O-methyladenosine with a 3'-phosphorothioate linkage
  modified_base 23: mod_base = um
taaaatcagcagtatcaggaaat

SEQ ID NO: 497 - RNA, 23 nt, synthetic construct
  source 1..23: mol_type = other RNA
  modified_base 1: mod_base = OTHER; note = 2'-O-methyluridine with a 3'-phosphorothioate linkage
  modified_base 2: mod_base = OTHER; note = 2'-fluoroadenosine with a 3'-phosphorothioate linkage
  modified_base 3: mod_base = gm
  modified_base 4: mod_base = OTHER; note = 2'-O-methyladenosine
  modified_base 5: mod_base = OTHER; note = 2'-fluoroadenosine
  modified_base 6: mod_base = OTHER; note = 2'-O-methyladenosine
  modified_base 7: mod_base = OTHER; note = 2'-fluoroadenosine
  modified_base 8: mod_base = um
  modified_base 9: mod_base = gm
  modified_base 10: mod_base = um
  modified_base 11: mod_base = um
  modified_base 12: mod_base = um
  modified_base 13: mod_base = um
  modified_base 14: mod_base = OTHER; note = 2'-fluorocytidine
  modified_base 15: mod_base = um
  modified_base 16: mod_base = OTHER; note = 2'-fluorouridine
  modified_base 17: mod_base = cm
  modified_base 18: mod_base = um
  modified_base 19: mod_base = um
  modified_base 20: mod_base = cm
  modified_base 21: mod_base = OTHER; note = 2'-O-methyladenosine with a 3'-phosphorothioate linkage
  modified_base 22: mod_base = OTHER; note = 2'-O-methylcytidine with a 3'-phosphorothioate linkage
  modified_base 23: mod_base = cm
tagaaaatgttttcttcttcacc

SEQ ID NO: 498 - RNA, 23 nt, synthetic construct
  source 1..23: mol_type = other RNA
  modified_base 1: mod_base = OTHER; note = 2'-O-methyluridine with a 3'-phosphorothioate linkage
  modified_base 2: mod_base = OTHER; note = 2'-fluorouridine with a 3'-phosphorothioate linkage
  modified_base 3: mod_base = um
  modified_base 4: mod_base = um
  modified_base 5: mod_base = OTHER; note = 2'-fluoroguanosine
  modified_base 6: mod_base = OTHER; note = 2'-O-methyladenosine
  modified_base 7: mod_base = OTHER; note = 2'-fluoroadenosine
  modified_base 8: mod_base = um
  modified_base 9: mod_base = gm
  modified_base 10: mod_base = OTHER; note = 2'-O-methyladenosine
  modified_base 11: mod_base = um
  modified_base 12: mod_base = um
  modified_base 13: mod_base = cm
  modified_base 14: mod_base = OTHER; note = 2'-fluorouridine
  modified_base 15: mod_base = um
  modified_base 16: mod_base = OTHER; note = 2'-fluorouridine
  modified_base 17: mod_base = cm
  modified_base 18: mod_base = gm
  modified_base 19: mod_base = OTHER; note = 2'-O-methyladenosine
  modified_base 20: mod_base = gm
  modified_base 21: mod_base = OTHER; note = 2'-O-methyladenosine with a 3'-phosphorothioate linkage
  modified_base 22: mod_base = OTHER; note = 2'-O-methyladenosine with a 3'-phosphorothioate linkage
  modified_base 23: mod_base = OTHER; note = 2'-O-methyladenosine
ttttgaatgattctttcgagaaa

SEQ ID NO: 499 - RNA, 23 nt, synthetic construct
  source 1..23: mol_type = other RNA
  modified_base 1: mod_base = OTHER; note = 2'-O-methyluridine with a 3'-phosphorothioate linkage
  modified_base 2: mod_base = OTHER; note = 2'-fluoroguanosine with a 3'-phosphorothioate linkage
  modified_base 3: mod_base = um
  modified_base 4: mod_base = um
  modified_base 5: mod_base = OTHER; note = 2'-fluorouridine
  modified_base 6: mod_base = gm
  modified_base 7: mod_base = OTHER; note = 2'-fluoroadenosine
  modified_base 8: mod_base = OTHER; note = 2'-O-methyladenosine
  modified_base 9: mod_base = um
  modified_base 10: mod_base = gm
  modified_base 11: mod_base = OTHER; note = 2'-O-methyladenosine
  modified_base 12: mod_base = um
  modified_base 13: mod_base = um
  modified_base 14: mod_base = OTHER; note = 2'-fluorocytidine
  modified_base 15: mod_base = um
  modified_base 16: mod_base = OTHER; note = 2'-fluorouridine
  modified_base 17: mod_base = um
  modified_base 18: mod_base = cm
  modified_base 19: mod_base = gm
  modified_base 20: mod_base = OTHER; note = 2'-O-methyladenosine
  modified_base 21: mod_base = OTHER; note = 2'-O-methylguanosine with a 3'-phosphorothioate linkage
  modified_base 22: mod_base = OTHER; note = 2'-O-methyladenosine with a 3'-phosphorothioate linkage
  modified_base 23: mod_base = OTHER; note = 2'-O-methyladenosine
tgtttgaatgattctttcgagaa

SEQ ID NO: 500 - RNA, 23 nt, synthetic construct
  source 1..23: mol_type = other RNA
  modified_base 1: mod_base = OTHER; note = 2'-O-methyluridine with a 3'-phosphorothioate linkage
  modified_base 2: mod_base = OTHER; note = 2'-fluoroadenosine with a 3'-phosphorothioate linkage
  modified_base 3: mod_base = gm
  modified_base 4: mod_base = um
  modified_base 5: mod_base = OTHER; note = 2'-fluorouridine
  modified_base 6: mod_base = um
  modified_base 7: mod_base = OTHER; note = 2'-fluoroguanosine
  modified_base 8: mod_base = OTHER; note = 2'-O-methyladenosine
  modified_base 9: mod_base = OTHER; note = 2'-O-methyladenosine
  modified_base 10: mod_base = um
  modified_base 11: mod_base = gm
  modified_base 12: mod_base = OTHER; note = 2'-O-methyladenosine
  modified_base 13: mod_base = um
  modified_base 14: mod_base = OTHER; note = 2'-fluorouridine
  modified_base 15: mod_base = cm
  modified_base 16: mod_base = OTHER; note = 2'-fluorouridine
  modified_base 17: mod_base = um
  modified_base 18: mod_base = um
  modified_base 19: mod_base = cm
  modified_base 20: mod_base = gm
  modified_base 21: mod_base = OTHER; note = 2'-O-methyladenosine with a 3'-phosphorothioate linkage
  modified_base 22: mod_base = OTHER; note = 2'-O-methylguanosine with a 3'-phosphorothioate linkage
  modified_base 23: mod_base = OTHER; note = 2'-O-methyladenosine
tagtttgaatgattctttcgaga

SEQ ID NO: 501 - RNA, 23 nt, synthetic construct
  source 1..23: mol_type = other RNA
  modified_base 1: mod_base = OTHER; note = 2'-O-methyluridine with a 3'-phosphorothioate linkage
  modified_base 2: mod_base = OTHER; note = 2'-fluorouridine with a 3'-phosphorothioate linkage
  modified_base 3: mod_base = OTHER; note = 2'-O-methyladenosine
  modified_base 4: mod_base = OTHER; note = 2'-O-methyladenosine
  modified_base 5: mod_base = OTHER; note = 2'-fluorouridine
  modified_base 6: mod_base = gm
  modified_base 7: mod_base = OTHER; note = 2'-fluoroadenosine
  modified_base 8: mod_base = gm
  modified_base 9: mod_base = um
  modified_base 10: mod_base = cm
  modified_base 11: mod_base = OTHER; note = 2'-O-methyladenosine
  modified_base 12: mod_base = um
  modified_base 13: mod_base = OTHER; note = 2'-O-methyladenosine
  modified_base 14: mod_base = OTHER; note = 2'-fluorocytidine
  modified_base 15: mod_base = um
  modified_base 16: mod_base = OTHER; note = 2'-fluorocytidine
  modified_base 17: mod_base = um
  modified_base 18: mod_base = um
  modified_base 19: mod_base = cm
  modified_base 20: mod_base = um
  modified_base 21: mod_base = OTHER; note = 2'-O-methyladenosine with a 3'-phosphorothioate linkage
  modified_base 22: mod_base = OTHER; note = 2'-O-methylcytidine with a 3'-phosphorothioate linkage
  modified_base 23: mod_base = um
ttaatgagtcatactcttctact

SEQ ID NO: 502 - RNA, 23 nt, synthetic construct
  source 1..23: mol_type = other RNA
  modified_base 1: mod_base = OTHER; note = 2'-O-methyluridine with a 3'-phosphorothioate linkage
  modified_base 2: mod_base = OTHER; note = 2'-fluorocytidine with a 3'-phosphorothioate linkage
  modified_base 3: mod_base = um
  modified_base 4: mod_base = OTHER; note = 2'-O-methyladenosine
  modified_base 5: mod_base = OTHER; note = 2'-fluorouridine
  modified_base 6: mod_base = um
  modified_base 7: mod_base = OTHER; note = 2'-fluoroadenosine
  modified_base 8: mod_base = OTHER; note = 2'-O-methyladenosine
  modified_base 9: mod_base = um
  modified_base 10: mod_base = gm
  modified_base 11: mod_base = OTHER; note = 2'-O-methyladenosine
  modified_base 12: mod_base = gm
  modified_base 13: mod_base = um
  modified_base 14: mod_base = OTHER; note = 2'-fluorocytidine
  modified_base 15: mod_base = OTHER; note = 2'-O-methyladenosine
  modified_base 16: mod_base = OTHER; note = 2'-fluorouridine
  modified_base 17: mod_base = OTHER; note = 2'-O-methyladenosine
  modified_base 18: mod_base = cm
  modified_base 19: mod_base = um
  modified_base 20: mod_base = cm
  modified_base 21: mod_base = OTHER; note = 2'-O-methyluridine with a 3'-phosphorothioate linkage
  modified_base 22: mod_base = OTHER; note = 2'-O-methyluridine with a 3'-phosphorothioate linkage
  modified_base 23: mod_base = cm
tctattaatgagtcatactcttc

SEQ ID NO: 503 - RNA, 23 nt, synthetic construct
  source 1..23: mol_type = other RNA
  modified_base 1: mod_base = OTHER; note = 2'-O-methyluridine with a 3'-phosphorothioate linkage
  modified_base 2: mod_base = OTHER; note = 2'-fluorocytidine with a 3'-phosphorothioate linkage
  modified_base 3: mod_base = um
  modified_base 4: mod_base = um
  modified_base 5: mod_base = OTHER; note = 2'-fluorocytidine
  modified_base 6: mod_base = gm
  modified_base 7: mod_base = OTHER; note = 2'-fluoroadenosine
  modified_base 8: mod_base = OTHER; note = 2'-O-methyladenosine
  modified_base 9: mod_base = gm
  modified_base 10: mod_base = OTHER; note = 2'-O-methyladenosine
  modified_base 11: mod_base = OTHER; note = 2'-O-methyladenosine
  modified_base 12: mod_base = OTHER; note = 2'-O-methyladenosine
  modified_base 13: mod_base = um
  modified_base 14: mod_base = OTHER; note = 2'-fluoroadenosine
  modified_base 15: mod_base = um
  modified_base 16: mod_base = OTHER; note = 2'-fluoroadenosine
  modified_base 17: mod_base = OTHER; note = 2'-O-methyladenosine
  modified_base 18: mod_base = gm
  modified_base 19: mod_base = cm
  modified_base 20: mod_base = OTHER; note = 2'-O-methyladenosine
  modified_base 21: mod_base = OTHER; note = 2'-O-methyladenosine with a 3'-phosphorothioate linkage
  modified_base 22: mod_base = OTHER; note = 2'-O-methyluridine with a 3'-phosphorothioate linkage
  modified_base 23: mod_base = um
tcttcgaagaaatataagcaatt

SEQ ID NO: 504 - RNA, 23 nt, synthetic construct
  source 1..23: mol_type = other RNA
  modified_base 1: mod_base = OTHER; note = 2'-O-methyluridine with a 3'-phosphorothioate linkage
  modified_base 2: mod_base = OTHER; note = 2'-fluoroadenosine with a 3'-phosphorothioate linkage
  modified_base 3: mod_base = um
  modified_base 4: mod_base = gm
  modified_base 5: mod_base = OTHER; note = 2'-fluoroadenosine
  modified_base 6: mod_base = um
  modified_base 7: mod_base = OTHER; note = 2'-fluorocytidine
  modified_base 8: mod_base = OTHER; note = 2'-O-methyladenosine
  modified_base 9: mod_base = OTHER; note = 2'-O-methyladenosine
  modified_base 10: mod_base = gm
  modified_base 11: mod_base = OTHER; note = 2'-O-methyladenosine
  modified_base 12: mod_base = um
  modified_base 13: mod_base = gm
  modified_base 14: mod_base = OTHER; note = 2'-fluoroadenosine
  modified_base 15: mod_base = OTHER; note = 2'-O-methyladenosine
  modified_base 16: mod_base = OTHER; note = 2'-fluoroguanosine
  modified_base 17: mod_base = OTHER; note = 2'-O-methyladenosine
  modified_base 18: mod_base = OTHER; note = 2'-O-methyladenosine
  modified_base 19: mod_base = gm
  modified_base 20: mod_base = gm
  modified_base 21: mod_base = OTHER; note = 2'-O-methyladenosine with a 3'-phosphorothioate linkage
  modified_base 22: mod_base = OTHER; note = 2'-O-methyladenosine with a 3'-phosphorothioate linkage
  modified_base 23: mod_base = gm
tatgatcaagatgaagaaggaag

SEQ ID NO: 505 - RNA, 23 nt, synthetic construct
  source 1..23: mol_type = other RNA
  modified_base 1: mod_base = OTHER; note = 2'-O-methyluridine with a 3'-phosphorothioate linkage
  modified_base 2: mod_base = OTHER; note = 2'-fluoroadenosine with a 3'-phosphorothioate linkage
  modified_base 3: mod_base = OTHER; note = 2'-O-methyladenosine
  modified_base 4: mod_base = um
  modified_base 5: mod_base = OTHER; note = 2'-fluoroguanosine
  modified_base 6: mod_base = cm
  modified_base 7: mod_base = OTHER; note = 2'-fluoroadenosine
  modified_base 8: mod_base = OTHER; note = 2'-O-methyladenosine
  modified_base 9: mod_base = gm
  modified_base 10: mod_base = um
  modified_base 11: mod_base = cm
  modified_base 12: mod_base = um
  modified_base 13: mod_base = cm
  modified_base 14: mod_base = OTHER; note = 2'-fluoroguanosine
  modified_base 15: mod_base = OTHER; note = 2'-O-methyladenosine
  modified_base 16: mod_base = OTHER; note = 2'-fluoroadenosine
  modified_base 17: mod_base = cm
  modified_base 18: mod_base = um
  modified_base 19: mod_base = um
  modified_base 20: mod_base = um
  modified_base 21: mod_base = OTHER; note = 2'-O-methyluridine with a 3'-phosphorothioate linkage
  modified_base 22: mod_base = OTHER; note = 2'-O-methylguanosine with a 3'-phosphorothioate linkage
  modified_base 23: mod_base = cm
taatgcaagtctcgaacttttgc

SEQ ID NO: 506 - RNA, 23 nt, synthetic construct
  source 1..23: mol_type = other RNA
  modified_base 1: mod_base = OTHER; note = 2'-O-methyluridine with a 3'-phosphorothioate linkage
  modified_base 2: mod_base = OTHER; note = 2'-fluoroadenosine with a 3'-phosphorothioate linkage
  modified_base 3: mod_base = OTHER; note = 2'-O-methyladenosine
  modified_base 4: mod_base = OTHER; note = 2'-O-methyladenosine
  modified_base 5: mod_base = OTHER; note = 2'-fluorouridine
  modified_base 6: mod_base = gm
  modified_base 7: mod_base = OTHER; note = 2'-fluorocytidine
  modified_base 8: mod_base = OTHER; note = 2'-O-methyladenosine
  modified_base 9: mod_base = OTHER; note = 2'-O-methyladenosine
  modified_base 10: mod_base = gm
  modified_base 11: mod_base = um
  modified_base 12: mod_base = cm
  modified_base 13: mod_base = um
  modified_base 14: mod_base = OTHER; note = 2'-fluorocytidine
  modified_base 15: mod_base = gm
  modified_base 16: mod_base = OTHER; note = 2'-fluoroadenosine
  modified_base 17: mod_base = OTHER; note = 2'-O-methyladenosine
  modified_base 18: mod_base = cm
  modified_base 19: mod_base = um
  modified_base 20: mod_base = um
  modified_base 21: mod_base = OTHER; note = 2'-O-methyluridine with a 3'-phosphorothioate linkage
  modified_base 22: mod_base = OTHER; note = 2'-O-methyluridine with a 3'-phosphorothioate linkage
  modified_base 23: mod_base = gm
taaatgcaagtctcgaacttttg

SEQ ID NO: 507 - RNA, 23 nt, synthetic construct
  source 1..23: mol_type = other RNA
  modified_base 1: mod_base = OTHER; note = 2'-O-methyluridine with a 3'-phosphorothioate linkage
  modified_base 2: mod_base = OTHER; note = 2'-fluorouridine with a 3'-phosphorothioate linkage
  modified_base 3: mod_base = um
  modified_base 4: mod_base = um
  modified_base 5: mod_base = OTHER; note = 2'-fluorocytidine
  modified_base 6: mod_base = OTHER; note = 2'-O-methyladenosine
  modified_base 7: mod_base = OTHER; note = 2'-fluoroadenosine
  modified_base 8: mod_base = OTHER; note = 2'-O-methyladenosine
  modified_base 9: mod_base = um
  modified_base 10: mod_base = gm
  modified_base 11: mod_base = cm
  modified_base 12: mod_base = OTHER; note = 2'-O-methyladenosine
  modified_base 13: mod_base = OTHER; note = 2'-O-methyladenosine
  modified_base 14: mod_base = OTHER; note = 2'-fluoroguanosine
  modified_base 15: mod_base = um
  modified_base 16: mod_base = OTHER; note = 2'-fluorocytidine
  modified_base 17: mod_base = um
  modified_base 18: mod_base = cm
  modified_base 19: mod_base = gm
  modified_base 20: mod_base = OTHER; note = 2'-O-methyladenosine
  modified_base 21: mod_base = OTHER; note = 2'-O-methyladenosine with a 3'-phosphorothioate linkage
  modified_base 22: mod_base = OTHER; note = 2'-O-methylcytidine with a 3'-phosphorothioate linkage
  modified_base 23: mod_base = um
ttttcaaatgcaagtctcgaact

SEQ ID NO: 508 - RNA, 23 nt, synthetic construct
  source 1..23: mol_type = other RNA
  modified_base 1: mod_base = OTHER; note = 2'-O-methyluridine with a 3'-phosphorothioate linkage
  modified_base 2: mod_base = OTHER; note = 2'-fluorouridine with a 3'-phosphorothioate linkage
  modified_base 3: mod_base = gm
  modified_base 4: mod_base = OTHER; note = 2'-O-methyladenosine
  modified_base 5: mod_base = OTHER; note = 2'-fluorouridine
  modified_base 6: mod_base = OTHER; note = 2'-O-methyladenosine
  modified_base 7: mod_base = OTHER; note = 2'-fluoroadenosine
  modified_base 8: mod_base = OTHER; note = 2'-O-methyladenosine
  modified_base 9: mod_base = OTHER; note = 2'-O-methyladenosine
  modified_base 10: mod_base = gm
  modified_base 11: mod_base = OTHER; note = 2'-O-methyladenosine
  modified_base 12: mod_base = um
  modified_base 13: mod_base = um
  modified_base 14: mod_base = OTHER; note = 2'-fluorocytidine
  modified_base 15: mod_base = um
  modified_base 16: mod_base = OTHER; note = 2'-fluorouridine
  modified_base 17: mod_base = gm
  modified_base 18: mod_base = gm
  modified_base 19: mod_base = OTHER; note = 2'-O-methyladenosine
  modified_base 20: mod_base = gm
  modified_base 21: mod_base = OTHER; note = 2'-O-methyluridine with a 3'-phosphorothioate linkage
  modified_base 22: mod_base = OTHER; note = 2'-O-methyluridine with a 3'-phosphorothioate linkage
  modified_base 23: mod_base = um
ttgataaaagattcttggagttt

SEQ ID NO: 509 - RNA, 23 nt, synthetic construct
  source 1..23: mol_type = other RNA
  modified_base 1: mod_base = OTHER; note = 2'-O-methyluridine with a 3'-phosphorothioate linkage
  modified_base 2: mod_base = OTHER; note = 2'-fluoroadenosine with a 3'-phosphorothioate linkage
  modified_base 3: mod_base = um
  modified_base 4: mod_base = cm
  modified_base 5: mod_base = OTHER; note = 2'-fluorouridine
  modified_base 6: mod_base = OTHER; note = 2'-O-methyladenosine
  modified_base 7: mod_base = OTHER; note = 2'-fluoroadenosine
  modified_base 8: mod_base = um
  modified_base 9: mod_base = um
  modified_base 10: mod_base = cm
  modified_base 11: mod_base = um
  modified_base 12: mod_base = um
  modified_base 13: mod_base = cm
  modified_base 14: mod_base = OTHER; note = 2'-fluoroadenosine
  modified_base 15: mod_base = cm
  modified_base 16: mod_base = OTHER; note = 2'-fluorocytidine
  modified_base 17: mod_base = gm
  modified_base 18: mod_base = um
  modified_base 19: mod_base = cm
  modified_base 20: mod_base = um
  modified_base 21: mod_base = OTHER; note = 2'-O-methyluridine with a 3'-phosphorothioate linkage
  modified_base 22: mod_base = OTHER; note = 2'-O-methylcytidine with a 3'-phosphorothioate linkage
  modified_base 23: mod_base = OTHER; note = 2'-O-methyladenosine
tatctaattcttcaccgtcttca

SEQ ID NO: 510 - RNA, 23 nt, synthetic construct
  source 1..23: mol_type = other RNA
  modified_base 1: mod_base = OTHER; note = 2'-O-methyluridine with a 3'-phosphorothioate linkage
  modified_base 2: mod_base = OTHER; note = 2'-fluoroguanosine with a 3'-phosphorothioate linkage
  modified_base 3: mod_base = um
  modified_base 4: mod_base = OTHER; note = 2'-O-methyladenosine
  modified_base 5: mod_base = OTHER; note = 2'-fluorouridine
  modified_base 6: mod_base = cm
  modified_base 7: mod_base = OTHER; note = 2'-fluorouridine
  modified_base 8: mod_base = OTHER; note = 2'-O-methyladenosine
  modified_base 9: mod_base = OTHER; note = 2'-O-methyladenosine
  modified_base 10: mod_base = um
  modified_base 11: mod_base = um
  modified_base 12: mod_base = cm
  modified_base 13: mod_base = um
  modified_base 14: mod_base = OTHER; note = 2'-fluorouridine
  modified_base 15: mod_base = cm
  modified_base 16: mod_base = OTHER; note = 2'-fluoroadenosine
  modified_base 17: mod_base = cm
  modified_base 18: mod_base = cm
  modified_base 19: mod_base = gm
  modified_base 20: mod_base = um
  modified_base 21: mod_base = OTHER; note = 2'-O-methylcytidine with a 3'-phosphorothioate linkage
  modified_base 22: mod_base = OTHER; note = 2'-O-methyluridine with a 3'-phosphorothioate linkage
  modified_base 23: mod_base = um
tgtatctaattcttcaccgtctt

SEQ ID NO: 511 - RNA, 23 nt, synthetic construct
  source 1..23: mol_type = other RNA
  modified_base 1: mod_base = OTHER; note = 2'-O-methyluridine with a 3'-phosphorothioate linkage
  modified_base 2: mod_base = OTHER; note = 2'-fluoroguanosine with a 3'-phosphorothioate linkage
  modified_base 3: mod_base = OTHER; note = 2'-O-methyladenosine
  modified_base 4: mod_base = um
  modified_base 5: mod_base = OTHER; note = 2'-fluorouridine
  modified_base 6: mod_base = um
  modified_base 7: mod_base = OTHER; note = 2'-fluoroadenosine
  modified_base 8: mod_base = gm
  modified_base 9: mod_base = OTHER; note = 2'-O-methyladenosine
  modified_base 10: mod_base = um
  modified_base 11: mod_base = um
  modified_base 12: mod_base = gm
  modified_base 13: mod_base = um
  modified_base 14: mod_base = OTHER; note = 2'-fluorouridine
  modified_base 15: mod_base = um
  modified_base 16: mod_base = OTHER; note = 2'-fluorouridine
  modified_base 17: mod_base = cm
  modified_base 18: mod_base = cm
  modified_base 19: mod_base = OTHER; note = 2'-O-methyladenosine
  modified_base 20: mod_base = um
  modified_base 21: mod_base = OTHER; note = 2'-O-methyluridine with a 3'-phosphorothioate linkage
  modified_base 22: mod_base = OTHER; note = 2'-O-methyluridine with a 3'-phosphorothioate linkage
  modified_base 23: mod_base = cm
tgatttagattgttttccatttc

SEQ ID NO: 512 - RNA, 23 nt, synthetic construct
  source 1..23: mol_type = other RNA
  modified_base 1: mod_base = OTHER; note = 2'-O-methyluridine with a 3'-phosphorothioate linkage
  modified_base 2: mod_base = OTHER; note = 2'-fluorocytidine with a 3'-phosphorothioate linkage
  modified_base 3: mod_base = um
  modified_base 4: mod_base = um
  modified_base 5: mod_base = OTHER; note = 2'-fluorouridine
  modified_base 6: mod_base = OTHER; note = 2'-O-methyladenosine
  modified_base 7: mod_base = OTHER; note = 2'-fluorocytidine
  modified_base 8: mod_base = OTHER; note = 2'-O-methyladenosine
  modified_base 9: mod_base = um
  modified_base 10: mod_base = um
  modified_base 11: mod_base = um
  modified_base 12: mod_base = um
  modified_base 13: mod_base = um
  modified_base 14: mod_base = OTHER; note = 2'-fluorocytidine
  modified_base 15: mod_base = um
  modified_base 16: mod_base = OTHER; note = 2'-fluorouridine
  modified_base 17: mod_base = cm
  modified_base 18: mod_base = um
  modified_base 19: mod_base = um
  modified_base 20: mod_base = cm
  modified_base 21: mod_base = OTHER; note = 2'-O-methylcytidine with a 3'-phosphorothioate linkage
  modified_base 22: mod_base = OTHER; note = 2'-O-methyluridine with a 3'-phosphorothioate linkage
  modified_base 23: mod_base = cm
tctttacatttttcttcttcctc

SEQ ID NO: 513 - RNA, 23 nt, synthetic construct
  source 1..23: mol_type = other RNA
  modified_base 1: mod_base = OTHER; note = 2'-O-methyluridine with a 3'-phosphorothioate linkage
  modified_base 2: mod_base = OTHER; note = 2'-fluoroadenosine with a 3'-phosphorothioate linkage
  modified_base 3: mod_base = um
  modified_base 4: mod_base = OTHER; note = 2'-O-methyladenosine
  modified_base 5: mod_base = OTHER; note = 2'-fluorouridine
  modified_base 6: mod_base = um
  modified_base 7: mod_base = OTHER; note = 2'-fluorouridine
  modified_base 8: mod_base = um
  modified_base 9: mod_base = gm
  modified_base 10: mod_base = cm
  modified_base 11: mod_base = OTHER; note = 2'-O-methyladenosine
  modified_base 12: mod_base = OTHER; note = 2'-O-methyladenosine
  modified_base 13: mod_base = cm
  modified_base 14: mod_base = OTHER; note = 2'-fluorouridine
  modified_base 15: mod_base = gm
  modified_base 16: mod_base = OTHER; note = 2'-fluorocytidine
  modified_base 17: mod_base = cm
  modified_base 18: mod_base = OTHER; note = 2'-O-methyladenosine
  modified_base 19: mod_base = um
  modified_base 20: mod_base = OTHER; note = 2'-O-methyladenosine with a 3'-phosphorothioate linkage
  modified_base 21: mod_base = OTHER; note = 2'-O-methylguanosine with a 3'-phosphorothioate linkage
  modified_base 22: mod_base = OTHER; note = 2'-O-methyluridine with a 3'-phosphorothioate linkage
  modified_base 23: mod_base = OTHER; note = 2'-O-methyladenosine
tatattttgcaactgccatagta

SEQ ID NO: 514 - RNA, 23 nt, synthetic construct
  source 1..23: mol_type = other RNA
  modified_base 1: mod_base = OTHER; note = 2'-O-methyluridine with a 3'-phosphorothioate linkage
  modified_base 2: mod_base = OTHER; note = 2'-fluoroadenosine with a 3'-phosphorothioate linkage
  modified_base 3: mod_base = OTHER; note = 2'-O-methyladenosine
  modified_base 4: mod_base = um
  modified_base 5: mod_base = OTHER; note = 2'-fluoroadenosine
  modified_base 6: mod_base = um
  modified_base 7: mod_base = OTHER; note = 2'-fluorouridine
  modified_base 8: mod_base = um
  modified_base 9: mod_base = um
  modified_base 10: mod_base = gm
  modified_base 11: mod_base = cm
  modified_base 12: mod_base = OTHER; note = 2'-O-methyladenosine
  modified_base 13: mod_base = OTHER; note = 2'-O-methyladenosine
  modified_base 14: mod_base = OTHER; note = 2'-fluorocytidine
  modified_base 15: mod_base = um
  modified_base 16: mod_base = OTHER; note = 2'-fluoroguanosine
  modified_base 17: mod_base = cm
  modified_base 18: mod_base = cm
  modified_base 19: mod_base = OTHER; note = 2'-O-methyladenosine
  modified_base 20: mod_base = OTHER; note = 2'-O-methyluridine with a 3'-phosphorothioate linkage
  modified_base 21: mod_base = OTHER; note = 2'-O-methyladenosine with a 3'-phosphorothioate linkage
  modified_base 22: mod_base = OTHER; note = 2'-O-methylguanosine with a 3'-phosphorothioate linkage
  modified_base 23: mod_base = um
taatattttgcaactgccatagt

SEQ ID NO: 515 - RNA, 23 nt, synthetic construct
  source 1..23: mol_type = other RNA
  modified_base 1: mod_base = OTHER; note = 2'-O-methyluridine with a 3'-phosphorothioate linkage
  modified_base 2: mod_base = OTHER; note = 2'-fluoroguanosine with a 3'-phosphorothioate linkage
  modified_base 3: mod_base = OTHER; note = 2'-O-methyladenosine
  modified_base 4: mod_base = OTHER; note = 2'-O-methyladenosine
  modified_base 5: mod_base = OTHER; note = 2'-fluorouridine
  modified_base 6: mod_base = OTHER; note = 2'-O-methyladenosine
  modified_base 7: mod_base = OTHER; note = 2'-fluorouridine
  modified_base 8: mod_base = um
  modified_base 9: mod_base = um
  modified_base 10: mod_base = um
  modified_base 11: mod_base = gm
  modified_base 12: mod_base = cm
  modified_base 13: mod_base = OTHER; note = 2'-O-methyladenosine
  modified_base 14: mod_base = OTHER; note = 2'-fluoroadenosine
  modified_base 15: mod_base = cm
  modified_base 16: mod_base = OTHER; note = 2'-fluorouridine
  modified_base 17: mod_base = gm
  modified_base 18: mod_base = cm
  modified_base 19: mod_base = cm
  modified_base 20: mod_base = OTHER; note = 2'-O-methyladenosine with a 3'-phosphorothioate linkage
  modified_base 21: mod_base = OTHER; note = 2'-O-methyluridine with a 3'-phosphorothioate linkage
  modified_base 22: mod_base = OTHER; note = 2'-O-methyladenosine with a 3'-phosphorothioate linkage
  modified_base 23: mod_base = gm
tgaatattttgcaactgccatag

SEQ ID NO: 516 - RNA, 23 nt, synthetic construct
  source 1..23: mol_type = other RNA
  modified_base 1: mod_base = OTHER; note = 2'-O-methyluridine with a 3'-phosphorothioate linkage
  modified_base 2: mod_base = OTHER; note = 2'-fluorocytidine with a 3'-phosphorothioate linkage
  modified_base 3: mod_base = um
  modified_base 4: mod_base = gm
  modified_base 5: mod_base = OTHER; note = 2'-fluoroadenosine
  modified_base 6: mod_base = OTHER; note = 2'-O-methyladenosine
  modified_base 7: mod_base = OTHER; note = 2'-fluorouridine
  modified_base 8: mod_base = OTHER; note = 2'-O-methyladenosine
  modified_base 9: mod_base = um
  modified_base 10: mod_base = um
  modified_base 11: mod_base = um
  modified_base 12: mod_base = um
  modified_base 13: mod_base = gm
  modified_base 14: mod_base = OTHER; note = 2'-fluorocytidine
  modified_base 15: mod_base = OTHER; note = 2'-O-methyladenosine
  modified_base 16: mod_base = OTHER; note = 2'-fluoroadenosine
  modified_base 17: mod_base = cm
  modified_base 18: mod_base = um
  modified_base 19: mod_base = gm
  modified_base 20: mod_base = OTHER; note = 2'-O-methylcytidine with a 3'-phosphorothioate linkage
  modified_base 21: mod_base = OTHER; note = 2'-O-methylcytidine with a 3'-phosphorothioate linkage
  modified_base 22: mod_base = OTHER; note = 2'-O-methyladenosine with a 3'-phosphorothioate linkage
  modified_base 23: mod_base = um
tctgaatattttgcaactgccat

SEQ ID NO: 517 - RNA, 23 nt, synthetic construct
  source 1..23: mol_type = other RNA
  modified_base 1: mod_base = OTHER; note = 2'-O-methyluridine with a 3'-phosphorothioate linkage
  modified_base 2: mod_base = OTHER; note = 2'-fluorocytidine with a 3'-phosphorothioate linkage
  modified_base 3: mod_base = cm
  modified_base 4: mod_base = um
  modified_base 5: mod_base = OTHER; note = 2'-fluoroguanosine
  modified_base 6: mod_base = OTHER; note = 2'-O-methyladenosine
  modified_base 7: mod_base = OTHER; note = 2'-fluoroadenosine
  modified_base 8: mod_base = um
  modified_base 9: mod_base = OTHER; note = 2'-O-methyladenosine
  modified_base 10: mod_base = um
  modified_base 11: mod_base = um
  modified_base 12: mod_base = um
  modified_base 13: mod_base = um
  modified_base 14: mod_base = OTHER; note = 2'-fluoroguanosine
  modified_base 15: mod_base = cm
  modified_base 16: mod_base = OTHER; note = 2'-fluoroadenosine
  modified_base 17: mod_base = OTHER; note = 2'-O-methyladenosine
  modified_base 18: mod_base = cm
  modified_base 19: mod_base = um
  modified_base 20: mod_base = OTHER; note = 2'-O-methylguanosine with a 3'-phosphorothioate linkage
  modified_base 21: mod_base = OTHER; note = 2'-O-methylcytidine with a 3'-phosphorothioate linkage
  modified_base 22: mod_base = OTHER; note = 2'-O-methylcytidine with a 3'-phosphorothioate linkage
  modified_base 23: mod_base = OTHER; note = 2'-O-methyladenosine
tcctgaatattttgcaactgcca

SEQ ID NO: 518 - RNA, 23 nt, synthetic construct
  source 1..23: mol_type = other RNA
  modified_base 1: mod_base = OTHER; note = 2'-O-methyluridine with a 3'-phosphorothioate linkage
  modified_base 2: mod_base = OTHER; note = 2'-fluorouridine with a 3'-phosphorothioate linkage
  modified_base 3: mod_base = OTHER; note = 2'-O-methyladenosine
  modified_base 4: mod_base = OTHER; note = 2'-O-methyladenosine
  modified_base 5: mod_base = OTHER; note = 2'-fluorouridine
  modified_base 6: mod_base = gm
  modified_base 7: mod_base = OTHER; note = 2'-fluoroadenosine
  modified_base 8: mod_base = gm
  modified_base 9: mod_base = gm
  modified_base 10: mod_base = cm
  modified_base 11: mod_base = um
  modified_base 12: mod_base = um
  modified_base 13: mod_base = OTHER; note = 2'-O-methyladenosine
  modified_base 14: mod_base = OTHER; note = 2'-fluorouridine
  modified_base 15: mod_base = OTHER; note = 2'-O-methyladenosine
  modified_base 16: mod_base = OTHER; note = 2'-fluorocytidine
  modified_base 17: mod_base = cm
  modified_base 18: mod_base = OTHER; note = 2'-O-methyladenosine
  modified_base 19: mod_base = um
  modified_base 20: mod_base = OTHER; note = 2'-O-methyluridine with a 3'-phosphorothioate linkage
  modified_base 21: mod_base = OTHER; note = 2'-O-methylguanosine with a 3'-phosphorothioate linkage
  modified_base 22: mod_base = OTHER; note = 2'-O-methyluridine with a 3'-phosphorothioate linkage
  modified_base 23: mod_base = um
ttaatgaggcttataccattgtt

SEQ ID NO: 519 - RNA, 23 nt, synthetic construct
  source 1..23: mol_type = other RNA
  modified_base 1: mod_base = OTHER; note = 2'-O-methyluridine with a 3'-phosphorothioate linkage
  modified_base 2: mod_base = OTHER; note = 2'-fluoroguanosine with a 3'-phosphorothioate linkage
  modified_base 3: mod_base = OTHER; note = 2'-O-methyladenosine
  modified_base 4: mod_base = um
  modified_base 5: mod_base = OTHER; note = 2'-fluoroadenosine
  modified_base 6: mod_base = OTHER; note = 2'-O-methyladenosine
  modified_base 7: mod_base = OTHER; note = 2'-fluorouridine
  modified_base 8: mod_base = gm
  modified_base 9: mod_base = OTHER; note = 2'-O-methyladenosine
  modified_base 10: mod_base = gm
  modified_base 11: mod_base = gm
  modified_base 12: mod_base = cm
  modified_base 13: mod_base = um
  modified_base 14: mod_base = OTHER; note = 2'-fluorouridine
  modified_base 15: mod_base = OTHER; note = 2'-O-methyladenosine
  modified_base 16: mod_base = OTHER; note = 2'-fluorouridine
  modified_base 17: mod_base = OTHER; note = 2'-O-methyladenosine
  modified_base 18: mod_base = cm
  modified_base 19: mod_base = cm
  modified_base 20: mod_base = OTHER; note = 2'-O-methyladenosine with a 3'-phosphorothioate linkage
  modified_base 21: mod_base = OTHER; note = 2'-O-methyluridine with a 3'-phosphorothioate linkage
  modified_base 22: mod_base = OTHER; note = 2'-O-methyluridine with a 3'-phosphorothioate linkage
  modified_base 23: mod_base = gm
tgataatgaggcttataccattg

SEQ ID NO: 520 - RNA, 23 nt, synthetic construct
  source 1..23: mol_type = other RNA
  modified_base 1: mod_base = OTHER; note = 2'-O-methyluridine with a 3'-phosphorothioate linkage
  modified_base 2: mod_base = OTHER; note = 2'-fluorouridine with a 3'-phosphorothioate linkage
  modified_base 3: mod_base = um
  modified_base 4: mod_base = um
  modified_base 5: mod_base = OTHER; note = 2'-fluoroguanosine
  modified_base 6: mod_base = OTHER; note = 2'-O-methyladenosine
  modified_base 7: mod_base = OTHER; note = 2'-fluorouridine
  modified_base 8: mod_base = OTHER; note = 2'-O-methyladenosine
  modified_base 9: mod_base = OTHER; note = 2'-O-methyladenosine
  modified_base 10: mod_base = um
  modified_base 11: mod_base = gm
  modified_base 12: mod_base = OTHER; note = 2'-O-methyladenosine
  modified_base 13: mod_base = gm
  modified_base 14: mod_base = OTHER; note = 2'-fluoroguanosine
  modified_base 15: mod_base = cm
  modified_base 16: mod_base = OTHER; note = 2'-fluorouridine
  modified_base 17: mod_base = um
  modified_base 18: mod_base = OTHER; note = 2'-O-methyladenosine
  modified_base 19: mod_base = um
  modified_base 20: mod_base = OTHER; note = 2'-O-methyladenosine with a 3'-phosphorothioate linkage
  modified_base 21: mod_base = OTHER; note = 2'-O-methylcytidine with a 3'-phosphorothioate linkage
  modified_base 22: mod_base = OTHER; note = 2'-O-methylcytidine with a 3'-phosphorothioate linkage
  modified_base 23: mod_base = OTHER; note = 2'-O-methyladenosine
ttttgataatgaggcttatacca

SEQ ID NO: 521 - RNA, 23 nt, synthetic construct
  source 1..23: mol_type = other RNA
  modified_base 1: mod_base = OTHER; note = 2'-O-methyluridine with a 3'-phosphorothioate linkage
  modified_base 2: mod_base = OTHER; note = 2'-fluorouridine with a 3'-phosphorothioate linkage
  modified_base 3: mod_base = um
  modified_base 4: mod_base = um
  modified_base 5: mod_base = OTHER; note = 2'-fluorouridine
  modified_base 6: mod_base = gm
  modified_base 7: mod_base = OTHER; note = 2'-fluoroadenosine
  modified_base 8: mod_base = um
  modified_base 9: mod_base = OTHER; note = 2'-O-methyladenosine
  modified_base 10: mod_base = OTHER; note = 2'-O-methyladenosine
  modified_base 11: mod_base = um
  modified_base 12: mod_base = gm
  modified_base 13: mod_base = OTHER; note = 2'-O-methyladenosine
  modified_base 14: mod_base = OTHER; note = 2'-fluoroguanosine
  modified_base 15: mod_base = gm
  modified_base 16: mod_base = OTHER; note = 2'-fluorocytidine
  modified_base 17: mod_base = um
  modified_base 18: mod_base = um
  modified_base 19: mod_base = OTHER; note = 2'-O-methyladenosine
  modified_base 20: mod_base = OTHER; note = 2'-O-methyluridine with a 3'-phosphorothioate linkage
  modified_base 21: mod_base = OTHER; note = 2'-O-methyladenosine with a 3'-phosphorothioate linkage
  modified_base 22: mod_base = OTHER; note = 2'-O-methylcytidine with a 3'-phosphorothioate linkage
  modified_base 23: mod_base = cm
tttttgataatgaggcttatacc

SEQ ID NO: 522 - RNA, 23 nt, synthetic construct
  source 1..23: mol_type = other RNA
  modified_base 1: mod_base = OTHER; note = 2'-O-methyluridine with a 3'-phosphorothioate linkage
  modified_base 2: mod_base = OTHER; note = 2'-fluorocytidine with a 3'-phosphorothioate linkage
  modified_base 3: mod_base = um
  modified_base 4: mod_base = OTHER; note = 2'-O-methyladenosine
  modified_base 5: mod_base = OTHER; note = 2'-fluorouridine
  modified_base 6: mod_base = um
  modified_base 7: mod_base = OTHER; note = 2'-fluorocytidine
  modified_base 8: mod_base = cm
  modified_base 9: mod_base = um
  modified_base 10: mod_base = OTHER; note = 2'-O-methyladenosine
  modified_base 11: mod_base = um
  modified_base 12: mod_base = um
  modified_base 13: mod_base = um
  modified_base 14: mod_base = OTHER; note = 2'-fluoroadenosine
  modified_base 15: mod_base = gm
  modified_base 16: mod_base = OTHER; note = 2'-fluorouridine
  modified_base 17: mod_base = cm
  modified_base 18: mod_base = cm
  modified_base 19: mod_base = cm
  modified_base 20: mod_base = OTHER; note = 2'-O-methyluridine with a 3'-phosphorothioate linkage
  modified_base 21: mod_base = OTHER; note = 2'-O-methyluridine with a 3'-phosphorothioate linkage
  modified_base 22: mod_base = OTHER; note = 2'-O-methylguanosine with a 3'-phosphorothioate linkage
  modified_base 23: mod_base = um
tctattcctatttagtcccttgt

SEQ ID NO: 523 - RNA, 23 nt, synthetic construct
  source 1..23: mol_type = other RNA
  modified_base 1: mod_base = OTHER; note = 2'-O-methyluridine with a 3'-phosphorothioate linkage
  modified_base 2: mod_base = OTHER; note = 2'-fluoroadenosine with a 3'-phosphorothioate linkage
  modified_base 3: mod_base = OTHER; note = 2'-O-methyladenosine
  modified_base 4: mod_base = cm
  modified_base 5: mod_base = OTHER; note = 2'-fluorouridine
  modified_base 6: mod_base = OTHER; note = 2'-O-methyladenosine
  modified_base 7: mod_base = OTHER; note = 2'-fluorouridine
  modified_base 8: mod_base = um
  modified_base 9: mod_base = cm
  modified_base 10: mod_base = cm
  modified_base 11: mod_base = um
  modified_base 12: mod_base = OTHER; note = 2'-O-methyladenosine
  modified_base 13: mod_base = um
  modified_base 14: mod_base = OTHER; note = 2'-fluorouridine
  modified_base 15: mod_base = um
  modified_base 16: mod_base = OTHER; note = 2'-fluoroadenosine
  modified_base 17: mod_base = gm
  modified_base 18: mod_base = um
  modified_base 19: mod_base = cm
  modified_base 20: mod_base = OTHER; note = 2'-O-methylcytidine with a 3'-phosphorothioate linkage
  modified_base 21: mod_base = OTHER; note = 2'-O-methylcytidine with a 3'-phosphorothioate linkage
  modified_base 22: mod_base = OTHER; note = 2'-O-methyluridine with a 3'-phosphorothioate linkage
  modified_base 23: mod_base = um
taactattcctatttagtccctt

SEQ ID NO: 524 - RNA, 23 nt, synthetic construct
  source 1..23: mol_type = other RNA
  modified_base 1: mod_base = OTHER; note = 2'-O-methyluridine with a 3'-phosphorothioate linkage
  modified_base 2: mod_base = OTHER; note = 2'-fluorouridine with a 3'-phosphorothioate linkage
  modified_base 3: mod_base = gm
  modified_base 4: mod_base = OTHER; note = 2'-O-methyladenosine
  modified_base 5: mod_base = OTHER; note = 2'-fluorouridine
  modified_base 6: mod_base = OTHER; note = 2'-O-methyladenosine
  modified_base 7: mod_base = OTHER; note = 2'-fluorocytidine
  modified_base 8: mod_base = OTHER; note = 2'-O-methyladenosine
  modified_base 9: mod_base = gm
  modified_base 10: mod_base = OTHER; note = 2'-O-methyladenosine
  modified_base 11: mod_base = OTHER; note = 2'-O-methyladenosine
  modified_base 12: mod_base = gm
  modified_base 13: mod_base = OTHER; note = 2'-O-methyladenosine
  modified_base 14: mod_base = OTHER; note = 2'-fluorouridine
  modified_base 15: mod_base = gm
  modified_base 16: mod_base = OTHER; note = 2'-fluoroadenosine
  modified_base 17: mod_base = cm
  modified_base 18: mod_base = cm
  modified_base 19: mod_base = um
  modified_base 20: mod_base = OTHER; note = 2'-O-methyluridine with a 3'-phosphorothioate linkage
  modified_base 21: mod_base = OTHER; note = 2'-O-methyluridine with a 3'-phosphorothioate linkage
  modified_base 22: mod_base = OTHER; note = 2'-O-methylguanosine with a 3'-phosphorothioate linkage
  modified_base 23: mod_base = cm
ttgatacagaagatgacctttgc

SEQ ID NO: 525 - RNA, 23 nt, synthetic construct
  source 1..23: mol_type = other RNA
  modified_base 1: mod_base = OTHER; note = 2'-O-methyluridine with a 3'-phosphorothioate linkage
  modified_base 2: mod_base = OTHER; note = 2'-fluoroadenosine with a 3'-phosphorothioate linkage
  modified_base 3: mod_base = OTHER; note = 2'-O-methyladenosine
  modified_base 4: mod_base = OTHER; note = 2'-O-methyladenosine
  modified_base 5: mod_base = OTHER; note = 2'-fluoroadenosine
  modified_base 6: mod_base = um
  modified_base 7: mod_base = OTHER; note = 2'-fluorocytidine
  modified_base 8: mod_base = OTHER; note = 2'-O-methyladenosine
  modified_base 9: mod_base = gm
  modified_base 10: mod_base = cm
  modified_base 11: mod_base = OTHER; note = 2'-O-methyladenosine
  modified_base 12: mod_base = gm
  modified_base 13: mod_base = um
  modified_base 14: mod_base = OTHER; note = 2'-fluoroadenosine
  modified_base 15: mod_base = um
  modified_base 16: mod_base = OTHER; note = 2'-fluorocytidine
  modified_base 17: mod_base = OTHER; note = 2'-O-methyladenosine
  modified_base 18: mod_base = gm
  modified_base 19: mod_base = gm
  modified_base 20: mod_base = OTHER; note = 2'-O-methyladenosine with a 3'-phosphorothioate linkage
  modified_base 21: mod_base = OTHER; note = 2'-O-methyladenosine with a 3'-phosphorothioate linkage
  modified_base 22: mod_base = OTHER; note = 2'-O-methyladenosine with a 3'-phosphorothioate linkage
  modified_base 23: mod_base = um
taaaatcagcagtatcaggaaat

SEQ ID NO: 526 - RNA, 23 nt, synthetic construct
  source 1..23: mol_type = other RNA
  modified_base 1: mod_base = OTHER; note = 2'-O-methyluridine with a 3'-phosphorothioate linkage
  modified_base 2: mod_base = OTHER; note = 2'-fluoroadenosine with a 3'-phosphorothioate linkage
  modified_base 3: mod_base = gm
  modified_base 4: mod_base = OTHER; note = 2'-O-methyladenosine
  modified_base 5: mod_base = OTHER; note = 2'-fluoroadenosine
  modified_base 6: mod_base = OTHER; note = 2'-O-methyladenosine
  modified_base 7: mod_base = OTHER; note = 2'-fluoroadenosine
  modified_base 8: mod_base = um
  modified_base 9: mod_base = gm
  modified_base 10: mod_base = um
  modified_base 11: mod_base = um
  modified_base 12: mod_base = um
  modified_base 13: mod_base = um
  modified_base 14: mod_base = OTHER; note = 2'-fluorocytidine
  modified_base 15: mod_base = um
  modified_base 16: mod_base = OTHER; note = 2'-fluorouridine
  modified_base 17: mod_base = cm
  modified_base 18: mod_base = um
  modified_base 19: mod_base = um
  modified_base 20: mod_base = OTHER; note = 2'-O-methylcytidine with a 3'-phosphorothioate linkage
  modified_base 21: mod_base = OTHER; note = 2'-O-methyladenosine with a 3'-phosphorothioate linkage
  modified_base 22: mod_base = OTHER; note = 2'-O-methylcytidine with a 3'-phosphorothioate linkage
  modified_base 23: mod_base = cm
tagaaaatgttttcttcttcacc

SEQ ID NO: 527 - RNA, 23 nt, synthetic construct
  source 1..23: mol_type = other RNA
  modified_base 1: mod_base = OTHER; note = 2'-O-methyluridine with a 3'-phosphorothioate linkage
  modified_base 2: mod_base = OTHER; note = 2'-fluorouridine with a 3'-phosphorothioate linkage
  modified_base 3: mod_base = um
  modified_base 4: mod_base = um
  modified_base 5: mod_base = OTHER; note = 2'-fluoroguanosine
  modified_base 6: mod_base = OTHER; note = 2'-O-methyladenosine
  modified_base 7: mod_base = OTHER; note = 2'-fluoroadenosine
  modified_base 8: mod_base = um
  modified_base 9: mod_base = gm
  modified_base 10: mod_base = OTHER; note = 2'-O-methyladenosine
  modified_base 11: mod_base = um
  modified_base 12: mod_base = um
  modified_base 13: mod_base = cm
  modified_base 14: mod_base = OTHER; note = 2'-fluorouridine
  modified_base 15: mod_base = um
  modified_base 16: mod_base = OTHER; note = 2'-fluorouridine
  modified_base 17: mod_base = cm
  modified_base 18: mod_base = gm
  modified_base 19: mod_base = OTHER; note = 2'-O-methyladenosine
  modified_base 20: mod_base = OTHER; note = 2'-O-methylguanosine with a 3'-phosphorothioate linkage
  modified_base 21: mod_base = OTHER; note = 2'-O-methyladenosine with a 3'-phosphorothioate linkage
  modified_base 22: mod_base = OTHER; note = 2'-O-methyladenosine with a 3'-phosphorothioate linkage
  modified_base 23: mod_base = OTHER; note = 2'-O-methyladenosine
ttttgaatgattctttcgagaaa

SEQ ID NO: 528 - RNA, 23 nt, synthetic construct
  source 1..23: mol_type = other RNA
  modified_base 1: mod_base = OTHER; note = 2'-O-methyluridine with a 3'-phosphorothioate linkage
  modified_base 2: mod_base = OTHER; note = 2'-fluoroguanosine with a 3'-phosphorothioate linkage
  modified_base 3: mod_base = um
  modified_base 4: mod_base = um
  modified_base 5: mod_base = OTHER; note = 2'-fluorouridine
  modified_base 6: mod_base = gm
  modified_base 7: mod_base = OTHER; note = 2'-fluoroadenosine
  modified_base 8: mod_base = OTHER; note = 2'-O-methyladenosine
  modified_base 9: mod_base = um
  modified_base 10: mod_base = gm
  modified_base 11: mod_base = OTHER; note = 2'-O-methyladenosine
  modified_base 12: mod_base = um
  modified_base 13: mod_base = um
  modified_base 14: mod_base = OTHER; note = 2'-fluorocytidine
  modified_base 15: mod_base = um
  modified_base 16: mod_base = OTHER; note = 2'-fluorouridine
  modified_base 17: mod_base = um
  modified_base 18: mod_base = cm
  modified_base 19: mod_base = gm
  modified_base 20: mod_base = OTHER; note = 2'-O-methyladenosine with a 3'-phosphorothioate linkage
  modified_base 21: mod_base = OTHER; note = 2'-O-methylguanosine with a 3'-phosphorothioate linkage
  modified_base 22: mod_base = OTHER; note = 2'-O-methyladenosine with a 3'-phosphorothioate linkage
  modified_base 23: mod_base = OTHER; note = 2'-O-methyladenosine
tgtttgaatgattctttcgagaa

SEQ ID NO: 529 - RNA, 23 nt, synthetic construct
  source 1..23: mol_type = other RNA
  modified_base 1: mod_base = OTHER; note = 2'-O-methyluridine with a 3'-phosphorothioate linkage
  modified_base 2: mod_base = OTHER; note = 2'-fluoroadenosine with a 3'-phosphorothioate linkage
  modified_base 3: mod_base = gm
  modified_base 4: mod_base = um
  modified_base 5: mod_base = OTHER; note = 2'-fluorouridine
  modified_base 6: mod_base = um
  modified_base 7: mod_base = OTHER; note = 2'-fluoroguanosine
  modified_base 8: mod_base = OTHER; note = 2'-O-methyladenosine
  modified_base 9: mod_base = OTHER; note = 2'-O-methyladenosine
  modified_base 10: mod_base = um
  modified_base 11: mod_base = gm
  modified_base 12: mod_base = OTHER; note = 2'-O-methyladenosine
  modified_base 13: mod_base = um
  modified_base 14: mod_base = OTHER; note = 2'-fluorouridine
  modified_base 15: mod_base = cm
  modified_base 16: mod_base = OTHER; note = 2'-fluorouridine
  modified_base 17: mod_base = um
  modified_base 18: mod_base = um
  modified_base 19: mod_base = cm
  modified_base 20: mod_base = OTHER; note = 2'-O-methylguanosine with a 3'-phosphorothioate linkage
  modified_base 21: mod_base = OTHER; note = 2'-O-methyladenosine with a 3'-phosphorothioate linkage
  modified_base 22: mod_base = OTHER; note = 2'-O-methylguanosine with a 3'-phosphorothioate linkage
  modified_base 23: mod_base = OTHER; note = 2'-O-methyladenosine
tagtttgaatgattctttcgaga

SEQ ID NO: 530 - RNA, 23 nt, synthetic construct
  source 1..23: mol_type = other RNA
  modified_base 1: mod_base = OTHER; note = 2'-O-methyluridine with a 3'-phosphorothioate linkage
  modified_base 2: mod_base = OTHER; note = 2'-fluorouridine with a 3'-phosphorothioate linkage
  modified_base 3: mod_base = OTHER; note = 2'-O-methyladenosine
  modified_base 4: mod_base = OTHER; note = 2'-O-methyladenosine
  modified_base 5: mod_base = OTHER; note = 2'-fluorouridine
  modified_base 6: mod_base = gm
  modified_base 7: mod_base = OTHER; note = 2'-fluoroadenosine
  modified_base 8: mod_base = gm
  modified_base 9: mod_base = um
  modified_base 10: mod_base = cm
  modified_base 11: mod_base = OTHER; note = 2'-O-methyladenosine
  modified_base 12: mod_base = um
  modified_base 13: mod_base = OTHER; note = 2'-O-methyladenosine
  modified_base 14: mod_base = OTHER; note = 2'-fluorocytidine
  modified_base 15: mod_base = um
  modified_base 16: mod_base = OTHER; note = 2'-fluorocytidine
  modified_base 17: mod_base = um
  modified_base 18: mod_base = um
  modified_base 19: mod_base = cm
  modified_base 20: mod_base = OTHER; note = 2'-O-methyluridine with a 3'-phosphorothioate linkage
  modified_base 21: mod_base = OTHER; note = 2'-O-methyladenosine with a 3'-phosphorothioate linkage
  modified_base 22: mod_base = OTHER; note = 2'-O-methylcytidine with a 3'-phosphorothioate linkage
  modified_base 23: mod_base = um
ttaatgagtcatactcttctact

SEQ ID NO: 531 - RNA, 23 nt, synthetic construct
  source 1..23: mol_type = other RNA
  modified_base 1: mod_base = OTHER; note = 2'-O-methyluridine with a 3'-phosphorothioate linkage
  modified_base 2: mod_base = OTHER; note = 2'-fluorocytidine with a 3'-phosphorothioate linkage
  modified_base 3: mod_base = um
  modified_base 4: mod_base = OTHER; note = 2'-O-methyladenosine
  modified_base 5: mod_base = OTHER; note = 2'-fluorouridine
  modified_base 6: mod_base = um
  modified_base 7: mod_base = OTHER; note = 2'-fluoroadenosine
  modified_base 8: mod_base = OTHER; note = 2'-O-methyladenosine
  modified_base 9: mod_base = um
  modified_base 10: mod_base = gm
  modified_base 11: mod_base = OTHER; note = 2'-O-methyladenosine
  modified_base 12: mod_base = gm
  modified_base 13: mod_base = um
  modified_base 14: mod_base = OTHER; note = 2'-fluorocytidine
  modified_base 15: mod_base = OTHER; note = 2'-O-methyladenosine
  modified_base 16: mod_base = OTHER; note = 2'-fluorouridine
  modified_base 17: mod_base = OTHER; note = 2'-O-methyladenosine
  modified_base 18: mod_base = cm
  modified_base 19: mod_base = um
  modified_base 20: mod_base = OTHER; note = 2'-O-methylcytidine with a 3'-phosphorothioate linkage
  modified_base 21: mod_base = OTHER; note = 2'-O-methyluridine with a 3'-phosphorothioate linkage
  modified_base 22: mod_base = OTHER; note = 2'-O-methyluridine with a 3'-phosphorothioate linkage
  modified_base 23: mod_base = cm
tctattaatgagtcatactcttc

SEQ ID NO: 532 - RNA, 23 nt, synthetic construct
  source 1..23: mol_type = other RNA
  modified_base 1: mod_base = OTHER; note = 2'-O-methyluridine with a 3'-phosphorothioate linkage
  modified_base 2: mod_base = OTHER; note = 2'-fluorocytidine with a 3'-phosphorothioate linkage
  modified_base 3: mod_base = um
  modified_base 4: mod_base = um
  modified_base 5: mod_base = OTHER; note = 2'-fluorocytidine
  modified_base 6: mod_base = gm
  modified_base 7: mod_base = OTHER; note = 2'-fluoroadenosine
  modified_base 8: mod_base = OTHER; note = 2'-O-methyladenosine
  modified_base 9: mod_base = gm
  modified_base 10: mod_base = OTHER; note = 2'-O-methyladenosine
  modified_base 11: mod_base = OTHER; note = 2'-O-methyladenosine
  modified_base 12: mod_base = OTHER; note = 2'-O-methyladenosine
  modified_base 13: mod_base = um
  modified_base 14: mod_base = OTHER; note = 2'-fluoroadenosine
  modified_base 15: mod_base = um
  modified_base 16: mod_base = OTHER; note = 2'-fluoroadenosine
  modified_base 17: mod_base = OTHER; note = 2'-O-methyladenosine
  modified_base 18: mod_base = gm
  modified_base 19: mod_base = cm
  modified_base 20: mod_base = OTHER; note = 2'-O-methyladenosine with a 3'-phosphorothioate linkage
  modified_base 21: mod_base = OTHER; note = 2'-O-methyladenosine with a 3'-phosphorothioate linkage
  modified_base 22: mod_base = OTHER; note = 2'-O-methyluridine with a 3'-phosphorothioate linkage
  modified_base 23: mod_base = um
tcttcgaagaaatataagcaatt

SEQ ID NO: 533 - RNA, 23 nt, synthetic construct
  source 1..23: mol_type = other RNA
  modified_base 1: mod_base = OTHER; note = 2'-O-methyluridine with a 3'-phosphorothioate linkage
  modified_base 2: mod_base = OTHER; note = 2'-fluoroadenosine with a 3'-phosphorothioate linkage
  modified_base 3: mod_base = um
  modified_base 4: mod_base = gm
  modified_base 5: mod_base = OTHER; note = 2'-fluoroadenosine
  modified_base 6: mod_base = um
  modified_base 7: mod_base = OTHER; note = 2'-fluorocytidine
  modified_base 8: mod_base = OTHER; note = 2'-O-methyladenosine
  modified_base 9: mod_base = OTHER; note = 2'-O-methyladenosine
  modified_base 10: mod_base = gm
  modified_base 11: mod_base = OTHER; note = 2'-O-methyladenosine
  modified_base 12: mod_base = um
  modified_base 13: mod_base = gm
  modified_base 14: mod_base = OTHER; note = 2'-fluoroadenosine
  modified_base 15: mod_base = OTHER; note = 2'-O-methyladenosine
  modified_base 16: mod_base = OTHER; note = 2'-fluoroguanosine
  modified_base 17: mod_base = OTHER; note = 2'-O-methyladenosine
  modified_base 18: mod_base = OTHER; note = 2'-O-methyladenosine
  modified_base 19: mod_base = gm
  modified_base 20: mod_base = OTHER; note = 2'-O-methylguanosine with a 3'-phosphorothioate linkage
  modified_base 21: mod_base = OTHER; note = 2'-O-methyladenosine with a 3'-phosphorothioate linkage
  modified_base 22: mod_base = OTHER; note = 2'-O-methyladenosine with a 3'-phosphorothioate linkage
  modified_base 23: mod_base = gm
tatgatcaagatgaagaaggaag

SEQ ID NO: 534 - RNA, 23 nt, synthetic construct
  source 1..23: mol_type = other RNA
  modified_base 1: mod_base = OTHER; note = 2'-O-methyluridine with a 3'-phosphorothioate linkage
  modified_base 2: mod_base = OTHER; note = 2'-fluoroadenosine with a 3'-phosphorothioate linkage
  modified_base 3: mod_base = OTHER; note = 2'-O-methyladenosine
  modified_base 4: mod_base = um
  modified_base 5: mod_base = OTHER; note = 2'-fluoroguanosine
  modified_base 6: mod_base = cm
  modified_base 7: mod_base = OTHER; note = 2'-fluoroadenosine
  modified_base 8: mod_base = OTHER; note = 2'-O-methyladenosine
  modified_base 9: mod_base = gm
  modified_base 10: mod_base = um
  modified_base 11: mod_base = cm
  modified_base 12: mod_base = um
  modified_base 13: mod_base = cm
  modified_base 14: mod_base = OTHER; note = 2'-fluoroguanosine
  modified_base 15: mod_base = OTHER; note = 2'-O-methyladenosine
  modified_base 16: mod_base = OTHER; note = 2'-fluoroadenosine
  modified_base 17: mod_base = cm
  modified_base 18: mod_base = um
  modified_base 19: mod_base = um
  modified_base 20: mod_base = OTHER; note = 2'-O-methyluridine with a 3'-phosphorothioate linkage
  modified_base 21: mod_base = OTHER; note = 2'-O-methyluridine with a 3'-phosphorothioate linkage
  modified_base 22: mod_base = OTHER; note = 2'-O-methylguanosine with a 3'-phosphorothioate linkage
  modified_base 23: mod_base = cm
taatgcaagtctcgaacttttgc

SEQ ID NO: 535 - RNA, 23 nt, synthetic construct
  source 1..23: mol_type = other RNA
  modified_base 1: mod_base = OTHER; note = 2'-O-methyluridine with a 3'-phosphorothioate linkage
  modified_base 2: mod_base = OTHER; note = 2'-fluoroadenosine with a 3'-phosphorothioate linkage
  modified_base 3: mod_base = OTHER; note = 2'-O-methyladenosine
  modified_base 4: mod_base = OTHER; note = 2'-O-methyladenosine
  modified_base 5: mod_base = OTHER; note = 2'-fluorouridine
  modified_base 6: mod_base = gm
  modified_base 7: mod_base = OTHER; note = 2'-fluorocytidine
  modified_base 8: mod_base = OTHER; note = 2'-O-methyladenosine
  modified_base 9: mod_base = OTHER; note = 2'-O-methyladenosine
  modified_base 10: mod_base = gm
  modified_base 11: mod_base = um
  modified_base 12: mod_base = cm
  modified_base 13: mod_base = um
  modified_base 14: mod_base = OTHER; note = 2'-fluorocytidine
  modified_base 15: mod_base = gm
  modified_base 16: mod_base = OTHER; note = 2'-fluoroadenosine
  modified_base 17: mod_base = OTHER; note = 2'-O-methyladenosine
  modified_base 18: mod_base = cm
  modified_base 19: mod_base = um
  modified_base 20: mod_base = OTHER; note = 2'-O-methyluridine with a 3'-phosphorothioate linkage
  modified_base 21: mod_base = OTHER; note = 2'-O-methyluridine with a 3'-phosphorothioate linkage
  modified_base 22: mod_base = OTHER; note = 2'-O-methyluridine with a 3'-phosphorothioate linkage
  modified_base 23: mod_base = gm
taaatgcaagtctcgaacttttg

SEQ ID NO: 536 - RNA, 23 nt, synthetic construct
  source 1..23: mol_type = other RNA
  modified_base 1: mod_base = OTHER; note = 2'-O-methyluridine with a 3'-phosphorothioate linkage
  modified_base 2: mod_base = OTHER; note = 2'-fluorouridine with a 3'-phosphorothioate linkage
  modified_base 3: mod_base = um
  modified_base 4: mod_base = um
  modified_base 5: mod_base = OTHER; note = 2'-fluorocytidine
  modified_base 6: mod_base = OTHER; note = 2'-O-methyladenosine
  modified_base 7: mod_base = OTHER; note = 2'-fluoroadenosine
  modified_base 8: mod_base = OTHER; note = 2'-O-methyladenosine
  modified_base 9: mod_base = um
  modified_base 10: mod_base = gm
  modified_base 11: mod_base = cm
  modified_base 12: mod_base = OTHER; note = 2'-O-methyladenosine
  modified_base 13: mod_base = OTHER; note = 2'-O-methyladenosine
  modified_base 14: mod_base = OTHER; note = 2'-fluoroguanosine
  modified_base 15: mod_base = um
  modified_base 16: mod_base = OTHER; note = 2'-fluorocytidine
  modified_base 17: mod_base = um
  modified_base 18: mod_base = cm
  modified_base 19: mod_base = gm
  modified_base 20: mod_base = OTHER; note = 2'-O-methyladenosine with a 3'-phosphorothioate linkage
  modified_base 21: mod_base = OTHER; note = 2'-O-methyladenosine with a 3'-phosphorothioate linkage
  modified_base 22: mod_base = OTHER; note = 2'-O-methylcytidine with a 3'-phosphorothioate linkage
  modified_base 23: mod_base = um
ttttcaaatgcaagtctcgaact

SEQ ID NO: 537 - RNA, 23 nt, synthetic construct
  source 1..23: mol_type = other RNA
  modified_base 1: mod_base = OTHER; note = 2'-O-methyluridine with a 3'-phosphorothioate linkage
  modified_base 2: mod_base = OTHER; note = 2'-fluorouridine with a 3'-phosphorothioate linkage
  modified_base 3: mod_base = gm
  modified_base 4: mod_base = OTHER; note = 2'-O-methyladenosine
  modified_base 5: mod_base = OTHER; note = 2'-fluorouridine
  modified_base 6: mod_base = OTHER; note = 2'-O-methyladenosine
  modified_base 7: mod_base = OTHER; note = 2'-fluoroadenosine
  modified_base 8: mod_base = OTHER; note = 2'-O-methyladenosine
  modified_base 9: mod_base = OTHER; note = 2'-O-methyladenosine
  modified_base 10: mod_base = gm
  modified_base 11: mod_base = OTHER; note = 2'-O-methyladenosine
  modified_base 12: mod_base = um
  modified_base 13: mod_base = um
  modified_base 14: mod_base = OTHER; note = 2'-fluorocytidine
  modified_base 15: mod_base = um
  modified_base 16: mod_base = OTHER; note = 2'-fluorouridine
  modified_base 17: mod_base = gm
  modified_base 18: mod_base = gm
  modified_base 19: mod_base = OTHER; note = 2'-O-methyladenosine
  modified_base 20: mod_base = OTHER; note = 2'-O-methylguanosine with a 3'-phosphorothioate linkage
  modified_base 21: mod_base = OTHER; note = 2'-O-methyluridine with a 3'-phosphorothioate linkage
  modified_base 22: mod_base = OTHER; note = 2'-O-methyluridine with a 3'-phosphorothioate linkage
  modified_base 23: mod_base = um
ttgataaaagattcttggagttt

SEQ ID NO: 538 - RNA, 23 nt, synthetic construct
  source 1..23: mol_type = other RNA
  modified_base 1: mod_base = OTHER; note = 2'-O-methyluridine with a 3'-phosphorothioate linkage
  modified_base 2: mod_base = OTHER; note = 2'-fluoroadenosine with a 3'-phosphorothioate linkage
  modified_base 3: mod_base = um
  modified_base 4: mod_base = cm
  modified_base 5: mod_base = OTHER; note = 2'-fluorouridine
  modified_base 6: mod_base = OTHER; note = 2'-O-methyladenosine
  modified_base 7: mod_base = OTHER; note = 2'-fluoroadenosine
  modified_base 8: mod_base = um
  modified_base 9: mod_base = um
  modified_base 10: mod_base = cm
  modified_base 11: mod_base = um
  modified_base 12: mod_base = um
  modified_base 13: mod_base = cm
  modified_base 14: mod_base = OTHER; note = 2'-fluoroadenosine
  modified_base 15: mod_base = cm
  modified_base 16: mod_base = OTHER; note = 2'-fluorocytidine
  modified_base 17: mod_base = gm
  modified_base 18: mod_base = um
  modified_base 19: mod_base = cm
  modified_base 20: mod_base = OTHER; note = 2'-O-methyluridine with a 3'-phosphorothioate linkage
  modified_base 21: mod_base = OTHER; note = 2'-O-methyluridine with a 3'-phosphorothioate linkage
  modified_base 22: mod_base = OTHER; note = 2'-O-methylcytidine with a 3'-phosphorothioate linkage
  modified_base 23: mod_base = OTHER; note = 2'-O-methyladenosine
tatctaattcttcaccgtcttca

SEQ ID NO: 539 - RNA, 23 nt, synthetic construct
  source 1..23: mol_type = other RNA
  modified_base 1: mod_base = OTHER; note = 2'-O-methyluridine with a 3'-phosphorothioate linkage
  modified_base 2: mod_base = OTHER; note = 2'-fluoroguanosine with a 3'-phosphorothioate linkage
  modified_base 3: mod_base = um
  modified_base 4: mod_base = OTHER; note = 2'-O-methyladenosine
  modified_base 5: mod_base = OTHER; note = 2'-fluorouridine
  modified_base 6: mod_base = cm
  modified_base 7: mod_base = OTHER; note = 2'-fluorouridine
  modified_base 8: mod_base = OTHER; note = 2'-O-methyladenosine
  modified_base 9: mod_base = OTHER; note = 2'-O-methyladenosine
  modified_base 10: mod_base = um
  modified_base 11: mod_base = um
  modified_base 12: mod_base = cm
  modified_base 13: mod_base = um
  modified_base 14: mod_base = OTHER; note = 2'-fluorouridine
  modified_base 15: mod_base = cm
  modified_base 16: mod_base = OTHER; note = 2'-fluoroadenosine
  modified_base 17: mod_base = cm
  modified_base 18: mod_base = cm
  modified_base 19: mod_base = gm
  modified_base 20: mod_base = OTHER; note = 2'-O-methyluridine with a 3'-phosphorothioate linkage
  modified_base 21: mod_base = OTHER; note = 2'-O-methylcytidine with a 3'-phosphorothioate linkage
  modified_base 22: mod_base = OTHER; note = 2'-O-methyluridine with a 3'-phosphorothioate linkage
  modified_base 23: mod_base = um
tgtatctaattcttcaccgtctt

SEQ ID NO: 540 - RNA, 23 nt, synthetic construct
  source 1..23: mol_type = other RNA
  modified_base 1: mod_base = OTHER; note = 2'-O-methyluridine with a 3'-phosphorothioate linkage
  modified_base 2: mod_base = OTHER; note = 2'-fluoroguanosine with a 3'-phosphorothioate linkage
  modified_base 3: mod_base = OTHER; note = 2'-O-methyladenosine
  modified_base 4: mod_base = um
  modified_base 5: mod_base = OTHER; note = 2'-fluorouridine
  modified_base 6: mod_base = um
  modified_base 7: mod_base = OTHER; note = 2'-fluoroadenosine
  modified_base 8: mod_base = gm
  modified_base 9: mod_base = OTHER; note = 2'-O-methyladenosine
  modified_base 10: mod_base = um
  modified_base 11: mod_base = um
  modified_base 12: mod_base = gm
  modified_base 13: mod_base = um
  modified_base 14: mod_base = OTHER; note = 2'-fluorouridine
  modified_base 15: mod_base = um
  modified_base 16: mod_base = OTHER; note = 2'-fluorouridine
  modified_base 17: mod_base = cm
  modified_base 18: mod_base = cm
  modified_base 19: mod_base = OTHER; note = 2'-O-methyladenosine
  modified_base 20: mod_base = OTHER; note = 2'-O-methyluridine with a 3'-phosphorothioate linkage
  modified_base 21: mod_base = OTHER; note = 2'-O-methyluridine with a 3'-phosphorothioate linkage
  modified_base 22: mod_base = OTHER; note = 2'-O-methyluridine with a 3'-phosphorothioate linkage
  modified_base 23: mod_base = cm
tgatttagattgttttccatttc

SEQ ID NO: 541 - RNA, 23 nt, synthetic construct
  source 1..23: mol_type = other RNA
  modified_base 1: mod_base = OTHER; note = 2'-O-methyluridine with a 3'-phosphorothioate linkage
  modified_base 2: mod_base = OTHER; note = 2'-fluorocytidine with a 3'-phosphorothioate linkage
  modified_base 3: mod_base = um
  modified_base 4: mod_base = um
  modified_base 5: mod_base = OTHER; note = 2'-fluorouridine
  modified_base 6: mod_base = OTHER; note = 2'-O-methyladenosine
  modified_base 7: mod_base = OTHER; note = 2'-fluorocytidine
  modified_base 8: mod_base = OTHER; note = 2'-O-methyladenosine
  modified_base 9: mod_base = um
  modified_base 10: mod_base = um
  modified_base 11: mod_base = um
  modified_base 12: mod_base = um
  modified_base 13: mod_base = um
  modified_base 14: mod_base = OTHER; note = 2'-fluorocytidine
  modified_base 15: mod_base = um
  modified_base 16: mod_base = OTHER; note = 2'-fluorouridine
  modified_base 17: mod_base = cm
  modified_base 18: mod_base = um
  modified_base 19: mod_base = um
  modified_base 20: mod_base = OTHER; note = 2'-O-methylcytidine with a 3'-phosphorothioate linkage
  modified_base 21: mod_base = OTHER; note = 2'-O-methylcytidine with a 3'-phosphorothioate linkage
  modified_base 22: mod_base = OTHER; note = 2'-O-methyluridine with a 3'-phosphorothioate linkage
  modified_base 23: mod_base = cm
tctttacatttttcttcttcctc

SEQ ID NO: 542 - RNA, 23 nt, synthetic construct
  source 1..23: mol_type = other RNA
  modified_base 1: mod_base = OTHER; note = 2'-O-methyluridine with a 3'-phosphorothioate linkage
  modified_base 2: mod_base = OTHER; note = 2'-fluorouridine with a 3'-phosphorothioate linkage
  modified_base 3: mod_base = OTHER; note = 2'-O-methyladenosine
  modified_base 4: mod_base = um
  modified_base 5: mod_base = OTHER; note = 2'-fluorouridine
  modified_base 6: mod_base = OTHER; note = 2'-O-methyladenosine
  modified_base 7: mod_base = OTHER; note = 2'-fluoroadenosine
  modified_base 8: mod_base = um
  modified_base 9: mod_base = gm
  modified_base 10: mod_base = OTHER; note = 2'-O-methyladenosine
  modified_base 11: mod_base = gm
  modified_base 12: mod_base = um
  modified_base 13: mod_base = cm
  modified_base 14: mod_base = OTHER; note = 2'-fluoroadenosine
  modified_base 15: mod_base = um
  modified_base 16: mod_base = OTHER; note = 2'-fluoroadenosine
  modified_base 17: mod_base = cm
  modified_base 18: mod_base = um
  modified_base 19: mod_base = cm
  modified_base 20: mod_base = OTHER; note = 2'-O-methyluridine with a 3'-phosphorothioate linkage
  modified_base 21: mod_base = OTHER; note = 2'-O-methyluridine with a 3'-phosphorothioate linkage
  modified_base 22: mod_base = OTHER; note = Racemic 2-propyl-o-uridine with a 3'-phosphorothioate linkage
  modified_base 23: mod_base = OTHER; note = Racemic 2-propyl-o-uridine
ttattaatgagtcatactctttt

SEQ ID NO: 543 - RNA, 23 nt, synthetic construct
  source 1..23: mol_type = other RNA
  modified_base 1: mod_base = OTHER; note = 2'-O-methyluridine with a 3'-phosphorothioate linkage
  modified_base 2: mod_base = OTHER; note = 2'-fluorouridine with a 3'-phosphorothioate linkage
  modified_base 3: mod_base = OTHER; note = 2'-O-methyladenosine
  modified_base 4: mod_base = um
  modified_base 5: mod_base = OTHER; note = 2'-fluorouridine
  modified_base 6: mod_base = OTHER; note = 2'-O-methyladenosine
  modified_base 7: mod_base = OTHER; note = 2'-fluoroadenosine
  modified_base 8: mod_base = um
  modified_base 9: mod_base = gm
  modified_base 10: mod_base = OTHER; note = 2'-O-methyladenosine
  modified_base 11: mod_base = gm
  modified_base 12: mod_base = um
  modified_base 13: mod_base = cm
  modified_base 14: mod_base = OTHER; note = 2'-fluoroadenosine
  modified_base 15: mod_base = um
  modified_base 16: mod_base = OTHER; note = 2'-fluoroadenosine
  modified_base 17: mod_base = cm
  modified_base 18: mod_base = um
  modified_base 19: mod_base = cm
  modified_base 20: mod_base = OTHER; note = 2'-O-methyluridine with a 3'-phosphorothioate linkage
  modified_base 21: mod_base = OTHER; note = 2'-O-methyluridine with a 3'-phosphorothioate linkage
  modified_base 22: mod_base = OTHER; note = 2'-O-methylcytidine with a 3'-phosphorothioate linkage
  modified_base 23: mod_base = cm
ttattaatgagtcatactcttcc

SEQ ID NO: 544 - RNA, 23 nt, synthetic construct
  source 1..23: mol_type = other RNA
  modified_base 1: mod_base = OTHER; note = 2'-O-methyluridine with a 3'-phosphorothioate linkage
  modified_base 2: mod_base = OTHER; note = 2'-fluorouridine with a 3'-phosphorothioate linkage
  modified_base 3: mod_base = OTHER; note = 2'-O-methyladenosine
  modified_base 4: mod_base = um
  modified_base 5: mod_base = OTHER; note = 2'-fluorouridine
  modified_base 6: mod_base = OTHER; note = 2'-O-methyladenosine
  modified_base 7: mod_base = OTHER; note = 2'-fluoroadenosine
  modified_base 8: mod_base = um
  modified_base 9: mod_base = gm
  modified_base 10: mod_base = OTHER; note = 2'-O-methyladenosine
  modified_base 11: mod_base = gm
  modified_base 12: mod_base = um
  modified_base 13: mod_base = cm
  modified_base 14: mod_base = OTHER; note = 2'-fluoroadenosine
  modified_base 15: mod_base = um
  modified_base 16: mod_base = OTHER; note = 2'-fluoroadenosine
  modified_base 17: mod_base = cm
  modified_base 18: mod_base = um
  modified_base 19: mod_base = cm
  modified_base 20: mod_base = OTHER; note = 2'-O-methyluridine with a 3'-phosphorothioate linkage
  modified_base 21: mod_base = OTHER; note = 2'-O-methyluridine with a 3'-phosphorothioate linkage
  modified_base 22: mod_base = OTHER; note = 2'-O-methylguanosine with a 3'-phosphorothioate linkage
  modified_base 23: mod_base = gm
ttattaatgagtcatactcttgg

SEQ ID NO: 545 - RNA, 21 nt, synthetic construct
  source 1..21: mol_type = other RNA
  modified_base 1: mod_base = OTHER; note = 2'-O-methyluridine with a 3'-phosphorothioate linkage
  modified_base 2: mod_base = OTHER; note = 2'-fluorouridine with a 3'-phosphorothioate linkage
  modified_base 3: mod_base = OTHER; note = 2'-O-methyladenosine
  modified_base 4: mod_base = um
  modified_base 5: mod_base = OTHER; note = 2'-fluorouridine
  modified_base 6: mod_base = OTHER; note = 2'-O-methyladenosine
  modified_base 7: mod_base = OTHER; note = 2'-fluoroadenosine
  modified_base 8: mod_base = um
  modified_base 9: mod_base = gm
  modified_base 10: mod_base = OTHER; note = 2'-O-methyladenosine
  modified_base 11: mod_base = gm
  modified_base 12: mod_base = um
  modified_base 13: mod_base = cm
  modified_base 14: mod_base = OTHER; note = 2'-fluoroadenosine
  modified_base 15: mod_base = um
  modified_base 16: mod_base = OTHER; note = 2'-fluoroadenosine
  modified_base 17: mod_base = cm
  modified_base 18: mod_base = OTHER; note = 2'-O-methyluridine with a 3'-phosphorothioate linkage
  modified_base 19: mod_base = OTHER; note = 2'-O-methylcytidine with a 3'-phosphorothioate linkage
  modified_base 20: mod_base = OTHER; note = Racemic 2-propyl-o-uridine with a 3'-phosphorothioate linkage
  modified_base 21: mod_base = OTHER; note = Racemic 2-propyl-o-uridine
ttattaatgagtcatactctt

SEQ ID NO: 546 - RNA, 23 nt, synthetic construct
  source 1..23: mol_type = other RNA
  modified_base 1: mod_base = OTHER; note = 2'-O-methyluridine with a 3'-phosphorothioate linkage
  modified_base 2: mod_base = OTHER; note = 2'-fluorouridine with a 3'-phosphorothioate linkage
  modified_base 3: mod_base = OTHER; note = 2'-O-methyladenosine
  modified_base 4: mod_base = um
  modified_base 5: mod_base = OTHER; note = 2'-fluorouridine
  modified_base 6: mod_base = OTHER; note = 2'-O-methyladenosine
  modified_base 7: mod_base = OTHER; note = 2'-fluoroadenosine
  modified_base 8: mod_base = um
  modified_base 9: mod_base = gm
  modified_base 10: mod_base = OTHER; note = 2'-O-methyladenosine
  modified_base 11: mod_base = gm
  modified_base 12: mod_base = um
  modified_base 13: mod_base = cm
  modified_base 14: mod_base = OTHER; note = 2'-fluoroadenosine
  modified_base 15: mod_base = um
  modified_base 16: mod_base = OTHER; note = 2'-fluoroadenosine
  modified_base 17: mod_base = cm
  modified_base 18: mod_base = um
  modified_base 19: mod_base = cm
  modified_base 20: mod_base = OTHER; note = 2'-O-methyluridine with a 3'-phosphorothioate linkage
  modified_base 21: mod_base = OTHER; note = 2'-O-methylguanosine with a 3'-phosphorothioate linkage
  modified_base 22: mod_base = OTHER; note = 2'-O-methylcytidine with a 3'-phosphorothioate linkage
  modified_base 23: mod_base = um
ttattaatgagtcatactctgct

SEQ ID NO: 547 - RNA, 22 nt, synthetic construct
  source 1..22: mol_type = other RNA
  modified_base 1: mod_base = OTHER; note = 2'-O-methyluridine with a 3'-phosphorothioate linkage
  modified_base 2: mod_base = OTHER; note = 2'-fluorouridine with a 3'-phosphorothioate linkage
  modified_base 3: mod_base = OTHER; note = 2'-O-methyladenosine
  modified_base 4: mod_base = um
  modified_base 5: mod_base = OTHER; note = 2'-fluorouridine
  modified_base 6: mod_base = OTHER; note = 2'-O-methyladenosine
  modified_base 7: mod_base = OTHER; note = 2'-fluoroadenosine
  modified_base 8: mod_base = um
  modified_base 9: mod_base = gm
  modified_base 10: mod_base = OTHER; note = 2'-O-methyladenosine
  modified_base 11: mod_base = gm
  modified_base 12: mod_base = um
  modified_base 13: mod_base = cm
  modified_base 14: mod_base = OTHER; note = 2'-fluoroadenosine
  modified_base 15: mod_base = um
  modified_base 16: mod_base = OTHER; note = 2'-fluoroadenosine
  modified_base 17: mod_base = cm
  modified_base 18: mod_base = um
  modified_base 19: mod_base = OTHER; note = 2'-O-methylcytidine with a 3'-phosphorothioate linkage
  modified_base 20: mod_base = OTHER; note = 2'-O-methyluridine with a 3'-phosphorothioate linkage
  modified_base 21: mod_base = OTHER; note = Racemic 2-propyl-o-uridine with a 3'-phosphorothioate linkage
  modified_base 22: mod_base = OTHER; note = Racemic 2-propyl-o-uridine
ttattaatgagtcatactcttt

SEQ ID NO: 548 - RNA, 23 nt, synthetic construct
  source 1..23: mol_type = other RNA
  modified_base 1: mod_base = OTHER; note = 2'-O-methyluridine with a 3'-phosphorothioate linkage
  modified_base 2: mod_base = OTHER; note = 2'-fluoroadenosine with a 3'-phosphorothioate linkage
  modified_base 3: mod_base = um
  modified_base 4: mod_base = OTHER; note = 2'-O-methyladenosine
  modified_base 5: mod_base = OTHER; note = 2'-fluoroadenosine
  modified_base 6: mod_base = OTHER; note = 2'-O-methyladenosine
  modified_base 7: mod_base = OTHER; note = 2'-fluoroadenosine
  modified_base 8: mod_base = gm
  modified_base 9: mod_base = OTHER; note = 2'-O-methyladenosine
  modified_base 10: mod_base = um
  modified_base 11: mod_base = um
  modified_base 12: mod_base = cm
  modified_base 13: mod_base = um
  modified_base 14: mod_base = OTHER; note = 2'-fluorouridine
  modified_base 15: mod_base = gm
  modified_base 16: mod_base = OTHER; note = 2'-fluoroguanosine
  modified_base 17: mod_base = OTHER; note = 2'-O-methyladenosine
  modified_base 18: mod_base = OTHER; note = Unlocked guanosine
  modified_base 19: mod_base = um
  modified_base 20: mod_base = OTHER; note = 2'-O-methyluridine with a 3'-phosphorothioate linkage
  modified_base 21: mod_base = OTHER; note = 2'-O-methyluridine with a 3'-phosphorothioate linkage
  modified_base 22: mod_base = OTHER; note = 2'-O-methyluridine with a 3'-phosphorothioate linkage
  modified_base 23: mod_base = gm
tataaaagattcttggagttttg

SEQ ID NO: 549 - RNA, 23 nt, synthetic construct
  source 1..23: mol_type = other RNA
  modified_base 1: mod_base = OTHER; note = 2'-O-methyluridine with a 3'-phosphorothioate linkage
  modified_base 2: mod_base = OTHER; note = 2'-fluoroadenosine with a 3'-phosphorothioate linkage
  modified_base 3: mod_base = um
  modified_base 4: mod_base = OTHER; note = 2'-O-methyladenosine
  modified_base 5: mod_base = OTHER; note = 2'-fluoroadenosine
  modified_base 6: mod_base = OTHER; note = 2'-O-methyladenosine
  modified_base 7: mod_base = OTHER; note = 2'-fluoroadenosine
  modified_base 8: mod_base = gm
  modified_base 9: mod_base = OTHER; note = 2'-O-methyladenosine
  modified_base 10: mod_base = um
  modified_base 11: mod_base = um
  modified_base 12: mod_base = OTHER; note = Unlocked cytidine
  modified_base 13: mod_base = um
  modified_base 14: mod_base = OTHER; note = 2'-fluorouridine
  modified_base 15: mod_base = gm
  modified_base 16: mod_base = OTHER; note = 2'-fluoroguanosine
  modified_base 17: mod_base = OTHER; note = 2'-O-methyladenosine
  modified_base 18: mod_base = gm
  modified_base 19: mod_base = um
  modified_base 20: mod_base = OTHER; note = 2'-O-methyluridine with a 3'-phosphorothioate linkage
  modified_base 21: mod_base = OTHER; note = 2'-O-methyluridine with a 3'-phosphorothioate linkage
  modified_base 22: mod_base = OTHER; note = 2'-O-methyluridine with a 3'-phosphorothioate linkage
  modified_base 23: mod_base = gm
tataaaagattcttggagttttg

SEQ ID NO: 550 - RNA, 23 nt, synthetic construct
  source 1..23: mol_type = other RNA
  modified_base 1: mod_base = OTHER; note = 2'-O-methyluridine with a 3'-phosphorothioate linkage
  modified_base 2: mod_base = OTHER; note = 2'-fluoroadenosine with a 3'-phosphorothioate linkage
  modified_base 3: mod_base = um
  modified_base 4: mod_base = OTHER; note = 2'-O-methyladenosine
  modified_base 5: mod_base = OTHER; note = 2'-fluoroadenosine
  modified_base 6: mod_base = OTHER; note = 2'-O-methyladenosine
  modified_base 7: mod_base = OTHER; note = 2'-fluoroadenosine
  modified_base 8: mod_base = gm
  modified_base 9: mod_base = OTHER; note = 2'-O-methyladenosine
  modified_base 10: mod_base = um
  modified_base 11: mod_base = um
  modified_base 12: mod_base = cm
  modified_base 13: mod_base = um
  modified_base 14: mod_base = OTHER; note = 2'-fluorouridine
  modified_base 15: mod_base = gm
  modified_base 16: mod_base = OTHER; note = 2'-fluoroguanosine
  modified_base 17: mod_base = OTHER; note = 2'-O-methyladenosine
  modified_base 18: mod_base = gm
  modified_base 19: mod_base = um
  modified_base 20: mod_base = OTHER; note = 2'-O-methyluridine with a 3'-phosphorothioate linkage
  modified_base 21: mod_base = OTHER; note = 2'-O-methyluridine with a 3'-phosphorothioate linkage
  modified_base 22: mod_base = OTHER; note = 2'-O-methylcytidine with a 3'-phosphorothioate linkage
  modified_base 23: mod_base = cm
tataaaagattcttggagtttcc

SEQ ID NO: 551 - RNA, 21 nt, synthetic construct
  source 1..21: mol_type = other RNA
  modified_base 1: mod_base = OTHER; note = 2'-O-methyluridine with a 3'-phosphorothioate linkage
  modified_base 2: mod_base = OTHER; note = 2'-fluoroadenosine with a 3'-phosphorothioate linkage
  modified_base 3: mod_base = um
  modified_base 4: mod_base = OTHER; note = 2'-O-methyladenosine
  modified_base 5: mod_base = OTHER; note = 2'-fluoroadenosine
  modified_base 6: mod_base = OTHER; note = 2'-O-methyladenosine
  modified_base 7: mod_base = OTHER; note = 2'-fluoroadenosine
  modified_base 8: mod_base = gm
  modified_base 9: mod_base = OTHER; note = 2'-O-methyladenosine
  modified_base 10: mod_base = um
  modified_base 11: mod_base = um
  modified_base 12: mod_base = cm
  modified_base 13: mod_base = um
  modified_base 14: mod_base = OTHER; note = 2'-fluorouridine
  modified_base 15: mod_base = gm
  modified_base 16: mod_base = OTHER; note = 2'-fluoroguanosine
  modified_base 17: mod_base = OTHER; note = 2'-O-methyladenosine
  modified_base 18: mod_base = OTHER; note = 2'-O-methylguanosine with a 3'-phosphorothioate linkage
  modified_base 19: mod_base = OTHER; note = 2'-O-methyluridine with a 3'-phosphorothioate linkage
  modified_base 20: mod_base = OTHER; note = Racemic 2-propyl-o-uridine with a 3'-phosphorothioate linkage
  modified_base 21: mod_base = OTHER; note = Racemic 2-propyl-o-uridine
tataaaagattcttggagttt

SEQ ID NO: 552 - RNA, 23 nt, synthetic construct
  source 1..23: mol_type = other RNA
  modified_base 1: mod_base = OTHER; note = 2'-O-methyluridine with a 3'-phosphorothioate linkage
  modified_base 2: mod_base = OTHER; note = 2'-fluoroadenosine with a 3'-phosphorothioate linkage
  modified_base 3: mod_base = um
  modified_base 4: mod_base = OTHER; note = 2'-O-methyladenosine
  modified_base 5: mod_base = OTHER; note = 2'-fluoroadenosine
  modified_base 6: mod_base = OTHER; note = 2'-O-methyladenosine
  modified_base 7: mod_base = OTHER; note = 2'-fluoroadenosine
  modified_base 8: mod_base = gm
  modified_base 9: mod_base = OTHER; note = 2'-O-methyladenosine
  modified_base 10: mod_base = um
  modified_base 11: mod_base = um
  modified_base 12: mod_base = cm
  modified_base 13: mod_base = um
  modified_base 14: mod_base = OTHER; note = 2'-fluorouridine
  modified_base 15: mod_base = gm
  modified_base 16: mod_base = OTHER; note = 2'-fluoroguanosine
  modified_base 17: mod_base = OTHER; note = 2'-O-methyladenosine
  modified_base 18: mod_base = gm
  modified_base 19: mod_base = um
  modified_base 20: mod_base = OTHER; note = 2'-O-methyluridine with a 3'-phosphorothioate linkage
  modified_base 21: mod_base = OTHER; note = 2'-O-methyluridine with a 3'-phosphorothioate linkage
  modified_base 22: mod_base = OTHER; note = 2'-O-methylguanosine with a 3'-phosphorothioate linkage
  modified_base 23: mod_base = gm
tataaaagattcttggagtttgg

SEQ ID NO: 553 - RNA, 23 nt, synthetic construct
  source 1..23: mol_type = other RNA
  modified_base 1: mod_base = OTHER; note = 2'-O-methyluridine with a 3'-phosphorothioate linkage
  modified_base 2: mod_base = OTHER; note = 2'-fluoroadenosine with a 3'-phosphorothioate linkage
  modified_base 3: mod_base = um
  modified_base 4: mod_base = OTHER; note = 2'-O-methyladenosine
  modified_base 5: mod_base = OTHER; note = 2'-fluoroadenosine
  modified_base 6: mod_base = OTHER; note = 2'-O-methyladenosine
  modified_base 7: mod_base = OTHER; note = 2'-fluoroadenosine
  modified_base 8: mod_base = gm
  modified_base 9: mod_base = OTHER; note = 2'-O-methyladenosine
  modified_base 10: mod_base = um
  modified_base 11: mod_base = um
  modified_base 12: mod_base = cm
  modified_base 13: mod_base = um
  modified_base 14: mod_base = OTHER; note = 2'-fluorouridine
  modified_base 15: mod_base = gm
  modified_base 16: mod_base = OTHER; note = 2'-fluoroguanosine
  modified_base 17: mod_base = OTHER; note = 2'-O-methyladenosine
  modified_base 18: mod_base = gm
  modified_base 19: mod_base = um
  modified_base 20: mod_base = OTHER; note = 2'-O-methyluridine with a 3'-phosphorothioate linkage
  modified_base 21: mod_base = OTHER; note = 2'-O-methyluridine with a 3'-phosphorothioate linkage
  modified_base 22: mod_base = OTHER; note = Racemic 2-propyl-o-uridine with a 3'-phosphorothioate linkage
  modified_base 23: mod_base = gm
tataaaagattcttggagttttg

SEQ ID NO: 554 - RNA, 23 nt, synthetic construct
  source 1..23: mol_type = other RNA
  modified_base 1: mod_base = OTHER; note = 2'-O-methyluridine with a 3'-phosphorothioate linkage
  modified_base 2: mod_base = OTHER; note = 2'-fluoroadenosine with a 3'-phosphorothioate linkage
  modified_base 3: mod_base = um
  modified_base 4: mod_base = OTHER; note = 2'-O-methyladenosine
  modified_base 5: mod_base = OTHER; note = 2'-fluoroadenosine
  modified_base 6: mod_base = OTHER; note = 2'-O-methyladenosine
  modified_base 7: mod_base = OTHER; note = 2'-fluoroadenosine
  modified_base 8: mod_base = gm
  modified_base 9: mod_base = OTHER; note = 2'-O-methyladenosine
  modified_base 10: mod_base = um
  modified_base 11: mod_base = um
  modified_base 12: mod_base = cm
  modified_base 13: mod_base = um
  modified_base 14: mod_base = OTHER; note = 2'-fluorouridine
  modified_base 15: mod_base = gm
  modified_base 16: mod_base = OTHER; note = 2'-fluoroguanosine
  modified_base 17: mod_base = OTHER; note = 2'-O-methyladenosine
  modified_base 18: mod_base = gm
  modified_base 19: mod_base = um
  modified_base 20: mod_base = OTHER; note = 2'-O-methyluridine with a 3'-phosphorothioate linkage
  modified_base 21: mod_base = OTHER; note = 2'-O-methylguanosine with a 3'-phosphorothioate linkage
  modified_base 22: mod_base = OTHER; note = 2'-O-methyluridine with a 3'-phosphorothioate linkage
  modified_base 23: mod_base = gm
tataaaagattcttggagttgtg

SEQ ID NO: 555 - RNA, 22 nt, synthetic construct
  source 1..22: mol_type = other RNA
  modified_base 1: mod_base = OTHER; note = 2'-O-methyluridine with a 3'-phosphorothioate linkage
  modified_base 2: mod_base = OTHER; note = 2'-fluoroadenosine with a 3'-phosphorothioate linkage
  modified_base 3: mod_base = um
  modified_base 4: mod_base = OTHER; note = 2'-O-methyladenosine
  modified_base 5: mod_base = OTHER; note = 2'-fluoroadenosine
  modified_base 6: mod_base = OTHER; note = 2'-O-methyladenosine
  modified_base 7: mod_base = OTHER; note = 2'-fluoroadenosine
  modified_base 8: mod_base = gm
  modified_base 9: mod_base = OTHER; note = 2'-O-methyladenosine
  modified_base 10: mod_base = um
  modified_base 11: mod_base = um
  modified_base 12: mod_base = cm
  modified_base 13: mod_base = um
  modified_base 14: mod_base = OTHER; note = 2'-fluorouridine
  modified_base 15: mod_base = gm
  modified_base 16: mod_base = OTHER; note = 2'-fluoroguanosine
  modified_base 17: mod_base = OTHER; note = 2'-O-methyladenosine
  modified_base 18: mod_base = gm
  modified_base 19: mod_base = OTHER; note = 2'-O-methyluridine with a 3'-phosphorothioate linkage
  modified_base 20: mod_base = OTHER; note = 2'-O-methyluridine with a 3'-phosphorothioate linkage
  modified_base 21: mod_base = OTHER; note = Racemic 2-propyl-o-uridine with a 3'-phosphorothioate linkage
  modified_base 22: mod_base = OTHER; note = Racemic 2-propyl-o-uridine
tataaaagattcttggagtttt

SEQ ID NO: 556 - RNA, 22 nt, synthetic construct
  source 1..22: mol_type = other RNA
  modified_base 1: mod_base = OTHER; note = 2'-O-methyluridine with a 3'-phosphorothioate linkage
  modified_base 2: mod_base = OTHER; note = 2'-fluoroadenosine with a 3'-phosphorothioate linkage
  modified_base 3: mod_base = um
  modified_base 4: mod_base = OTHER; note = 2'-O-methyladenosine
  modified_base 5: mod_base = OTHER; note = 2'-fluoroadenosine
  modified_base 6: mod_base = OTHER; note = 2'-O-methyladenosine
  modified_base 7: mod_base = OTHER; note = 2'-fluoroadenosine
  modified_base 8: mod_base = gm
  modified_base 9: mod_base = OTHER; note = 2'-O-methyladenosine
  modified_base 10: mod_base = um
  modified_base 11: mod_base = um
  modified_base 12: mod_base = cm
  modified_base 13: mod_base = um
  modified_base 14: mod_base = OTHER; note = 2'-fluorouridine
  modified_base 15: mod_base = gm
  modified_base 16: mod_base = OTHER; note = 2'-fluoroguanosine
  modified_base 17: mod_base = OTHER; note = 2'-O-methyladenosine
  modified_base 18: mod_base = gm
  modified_base 19: mod_base = OTHER; note = 2'-O-methyluridine with a 3'-phosphorothioate linkage
  modified_base 20: mod_base = OTHER; note = 2'-O-methyluridine with a 3'-phosphorothioate linkage
  modified_base 21: mod_base = OTHER; note = Racemic 2-propyl-o-uridine with a 3'-phosphorothioate linkage
  modified_base 22: mod_base = OTHER; note = Racemic 2-propyl-o-uridine
tataaaagattcttggagtttt

SEQ ID NO: 557 - DNA, 23 bp, synthetic construct
  source 1..23: mol_type = other DNA
  modified_base 1: mod_base = OTHER; note = 2'-O-methyluridine with a 3'-phosphorothioate linkage
  modified_base 2: mod_base = OTHER; note = 2'-fluoroadenosine with a 3'-phosphorothioate linkage
  modified_base 3: mod_base = um
  modified_base 5: mod_base = OTHER; note = 2'-O-methyladenosine
  modified_base 6: mod_base = OTHER; note = 2'-O-methyladenosine
  modified_base 8: mod_base = gm
  modified_base 9: mod_base = OTHER; note = 2'-O-methyladenosine
  modified_base 10: mod_base = um
  modified_base 11: mod_base = um
  modified_base 12: mod_base = cm
  modified_base 13: mod_base = um
  modified_base 14: mod_base = OTHER; note = 2'-fluorouridine
  modified_base 15: mod_base = gm
  modified_base 16: mod_base = OTHER; note = 2'-fluoroguanosine
  modified_base 17: mod_base = OTHER; note = 2'-O-methyladenosine
  modified_base 18: mod_base = gm
  modified_base 19: mod_base = um
  modified_base 20: mod_base = OTHER; note = 2'-O-methyluridine with a 3'-phosphorothioate linkage
  modified_base 21: mod_base = OTHER; note = 2'-O-methyluridine with a 3'-phosphorothioate linkage
  modified_base 22: mod_base = OTHER; note = 2'-O-methyluridine with a 3'-phosphorothioate linkage
  modified_base 23: mod_base = gm
  misc_feature 1..3: note = RNA
  misc_feature 4: note = DNA
  misc_feature 5..6: note = RNA
  misc_feature 7: note = DNA
  misc_feature 8..23: note = RNA
tataaaagattcttggagttttg

SEQ ID NO: 558 - RNA, 23 nt, synthetic construct
  source 1..23: mol_type = other RNA
  modified_base 1: mod_base = OTHER; note = 2'-O-methyluridine with a 3'-phosphorothioate linkage
  modified_base 2: mod_base = OTHER; note = 2'-fluoroadenosine with a 3'-phosphorothioate linkage
  modified_base 3: mod_base = um
  modified_base 4: mod_base = OTHER; note = 2'-O-methyladenosine
  modified_base 5: mod_base = OTHER; note = 2'-fluoroadenosine
  modified_base 6: mod_base = OTHER; note = 2'-O-methyladenosine
  modified_base 7: mod_base = OTHER; note = 2'-O-methyladenosine
  modified_base 8: mod_base = OTHER; note = 2'-fluoroguanosine
  modified_base 9: mod_base = OTHER; note = 2'-O-methyladenosine
  modified_base 10: mod_base = um
  modified_base 11: mod_base = um
  modified_base 12: mod_base = cm
  modified_base 13: mod_base = um
  modified_base 14: mod_base = OTHER; note = 2'-fluorouridine
  modified_base 15: mod_base = gm
  modified_base 16: mod_base = OTHER; note = 2'-fluoroguanosine
  modified_base 17: mod_base = OTHER; note = 2'-O-methyladenosine
  modified_base 18: mod_base = gm
  modified_base 19: mod_base = um
  modified_base 20: mod_base = OTHER; note = 2'-O-methyluridine with a 3'-phosphorothioate linkage
  modified_base 21: mod_base = OTHER; note = 2'-O-methyluridine with a 3'-phosphorothioate linkage
  modified_base 22: mod_base = OTHER; note = 2'-O-methyluridine with a 3'-phosphorothioate linkage
  modified_base 23: mod_base = gm
tataaaagattcttggagttttg

SEQ ID NO: 559 - RNA, 23 nt, synthetic construct
  source 1..23: mol_type = other RNA
  modified_base 1: mod_base = OTHER; note = 2'-O-methyluridine with a 3'-phosphorothioate linkage
  modified_base 2: mod_base = OTHER; note = 2'-fluoroguanosine with a 3'-phosphorothioate linkage
  modified_base 3: mod_base = OTHER; note = 2'-O-methyladenosine
  modified_base 4: mod_base = um
  modified_base 5: mod_base = OTHER; note = 2'-fluoroadenosine
  modified_base 6: mod_base = OTHER; note = 2'-O-methyladenosine
  modified_base 7: mod_base = OTHER; note = 2'-fluoroadenosine
  modified_base 8: mod_base = OTHER; note = 2'-O-methyladenosine
  modified_base 9: mod_base = gm
  modified_base 10: mod_base = OTHER; note = 2'-O-methyladenosine
  modified_base 11: mod_base = um
  modified_base 12: mod_base = um
  modified_base 13: mod_base = cm
  modified_base 14: mod_base = OTHER; note = 2'-fluorouridine
  modified_base 15: mod_base = um
  modified_base 16: mod_base = OTHER; note = 2'-fluoroguanosine
  modified_base 17: mod_base = gm
  modified_base 18: mod_base = OTHER; note = 2'-O-methyladenosine
  modified_base 19: mod_base = gm
  modified_base 20: mod_base = OTHER; note = 2'-O-methyluridine with a 3'-phosphorothioate linkage
  modified_base 21: mod_base = OTHER; note = 2'-O-methyluridine with a 3'-phosphorothioate linkage
  modified_base 22: mod_base = OTHER; note = Racemic 2-propyl-o-uridine with a 3'-phosphorothioate linkage
  modified_base 23: mod_base = OTHER; note = Racemic 2-propyl-o-uridine
tgataaaagattcttggagtttt

SEQ ID NO: 560 - RNA, 23 nt, synthetic construct
  source 1..23: mol_type = other RNA
  modified_base 1: mod_base = OTHER; note = 2'-O-methyluridine with a 3'-phosphorothioate linkage
  modified_base 2: mod_base = OTHER; note = 2'-fluoroguanosine with a 3'-phosphorothioate linkage
  modified_base 3: mod_base = OTHER; note = 2'-O-methyladenosine
  modified_base 4: mod_base = um
  modified_base 5: mod_base = OTHER; note = 2'-fluoroadenosine
  modified_base 6: mod_base = OTHER; note = 2'-O-methyladenosine
  modified_base 7: mod_base = OTHER; note = 2'-fluoroadenosine
  modified_base 8: mod_base = OTHER; note = 2'-O-methyladenosine
  modified_base 9: mod_base = gm
  modified_base 10: mod_base = OTHER; note = 2'-O-methyladenosine
  modified_base 11: mod_base = um
  modified_base 12: mod_base = um
  modified_base 13: mod_base = cm
  modified_base 14: mod_base = OTHER; note = 2'-fluorouridine
  modified_base 15: mod_base = um
  modified_base 16: mod_base = OTHER; note = 2'-fluoroguanosine
  modified_base 17: mod_base = gm
  modified_base 18: mod_base = OTHER; note = 2'-O-methyladenosine
  modified_base 19: mod_base = gm
  modified_base 20: mod_base = OTHER; note = 2'-O-methyluridine with a 3'-phosphorothioate linkage
  modified_base 21: mod_base = OTHER; note = 2'-O-methyluridine with a 3'-phosphorothioate linkage
  modified_base 22: mod_base = OTHER; note = 2'-O-methylcytidine with a 3'-phosphorothioate linkage
  modified_base 23: mod_base = cm
tgataaaagattcttggagttcc

SEQ ID NO: 561 - RNA, 21 nt, synthetic construct
  source 1..21: mol_type = other RNA
  modified_base 1: mod_base = OTHER; note = 2'-O-methyluridine with a 3'-phosphorothioate linkage
  modified_base 2: mod_base = OTHER; note = 2'-fluoroguanosine with a 3'-phosphorothioate linkage
  modified_base 3: mod_base = OTHER; note = 2'-O-methyladenosine
  modified_base 4: mod_base = um
  modified_base 5: mod_base = OTHER; note = 2'-fluoroadenosine
  modified_base 6: mod_base = OTHER; note = 2'-O-methyladenosine
  modified_base 7: mod_base = OTHER; note = 2'-fluoroadenosine
  modified_base 8: mod_base = OTHER; note = 2'-O-methyladenosine
  modified_base 9: mod_base = gm
  modified_base 10: mod_base = OTHER; note = 2'-O-methyladenosine
  modified_base 11: mod_base = um
  modified_base 12: mod_base = um
  modified_base 13: mod_base = cm
  modified_base 14: mod_base = OTHER; note = 2'-fluorouridine
  modified_base 15: mod_base = um
  modified_base 16: mod_base = OTHER; note = 2'-fluoroguanosine
  modified_base 17: mod_base = gm
  modified_base 18: mod_base = OTHER; note = 2'-O-methyladenosine with a 3'-phosphorothioate linkage
  modified_base 19: mod_base = OTHER; note = 2'-O-methylguanosine with a 3'-phosphorothioate linkage
  modified_base 20: mod_base = OTHER; note = Racemic 2-propyl-o-uridine with a 3'-phosphorothioate linkage
  modified_base 21: mod_base = OTHER; note = Racemic 2-propyl-o-uridine
tgataaaagattcttggagtt

SEQ ID NO: 562 - RNA, 23 nt, synthetic construct
  source 1..23: mol_type = other RNA
  modified_base 1: mod_base = OTHER; note = 2'-O-methyluridine with a 3'-phosphorothioate linkage
  modified_base 2: mod_base = OTHER; note = 2'-fluoroguanosine with a 3'-phosphorothioate linkage
  modified_base 3: mod_base = OTHER; note = 2'-O-methyladenosine
  modified_base 4: mod_base = um
  modified_base 5: mod_base = OTHER; note = 2'-fluoroadenosine
  modified_base 6: mod_base = OTHER; note = 2'-O-methyladenosine
  modified_base 7: mod_base = OTHER; note = 2'-fluorouridine
  modified_base 8: mod_base = OTHER; note = 2'-O-methyladenosine
  modified_base 9: mod_base = gm
  modified_base 10: mod_base = OTHER; note = 2'-O-methyladenosine
  modified_base 11: mod_base = um
  modified_base 12: mod_base = um
  modified_base 13: mod_base = cm
  modified_base 14: mod_base = OTHER; note = 2'-fluorouridine
  modified_base 15: mod_base = um
  modified_base 16: mod_base = OTHER; note = 2'-fluoroguanosine
  modified_base 17: mod_base = gm
  modified_base 18: mod_base = OTHER; note = 2'-O-methyladenosine
  modified_base 19: mod_base = gm
  modified_base 20: mod_base = OTHER; note = 2'-O-methyluridine with a 3'-phosphorothioate linkage
  modified_base 21: mod_base = OTHER; note = 2'-O-methyluridine with a 3'-phosphorothioate linkage
  modified_base 22: mod_base = OTHER; note = 2'-O-methyluridine with a 3'-phosphorothioate linkage
  modified_base 23: mod_base = um
tgataatagattcttggagtttt

SEQ ID NO: 563 - RNA, 23 nt, synthetic construct
  source 1..23: mol_type = other RNA
  modified_base 1: mod_base = OTHER; note = 2'-O-methyluridine with a 3'-phosphorothioate linkage
  modified_base 2: mod_base = OTHER; note = 2'-fluoroguanosine with a 3'-phosphorothioate linkage
  modified_base 3: mod_base = OTHER; note = 2'-O-methyladenosine
  modified_base 4: mod_base = um
  modified_base 5: mod_base = OTHER; note = 2'-fluoroadenosine
  modified_base 6: mod_base = OTHER; note = 2'-O-methyladenosine
  modified_base 7: mod_base = OTHER; note = 2'-fluoroadenosine
  modified_base 8: mod_base = OTHER; note = 2'-O-methyladenosine
  modified_base 9: mod_base = gm
  modified_base 10: mod_base = OTHER; note = 2'-O-methyladenosine
  modified_base 11: mod_base = um
  modified_base 12: mod_base = um
  modified_base 13: mod_base = cm
  modified_base 14: mod_base = OTHER; note = 2'-fluorouridine
  modified_base 15: mod_base = OTHER; note = Pseudouridine
  modified_base 16: mod_base = OTHER; note = 2'-fluoroguanosine
  modified_base 17: mod_base = gm
  modified_base 18: mod_base = OTHER; note = 2'-O-methyladenosine
  modified_base 19: mod_base = gm
  modified_base 20: mod_base = OTHER; note = Pseudouridine with a 3'-phosphorothioate linkage
  modified_base 21: mod_base = OTHER; note = Pseudouridine with a 3'-phosphorothioate linkage
  modified_base 22: mod_base = OTHER; note = 2'-O-methyluridine with a 3'-phosphorothioate linkage
  modified_base 23: mod_base = um
tgataaaagattctnggagnntt

SEQ ID NO: 564 - RNA, 23 nt, synthetic construct
  source 1..23: mol_type = other RNA
  modified_base 1: mod_base = OTHER; note = 2'-O-methyluridine with a 3'-phosphorothioate linkage
  modified_base 2: mod_base = OTHER; note = 2'-fluoroguanosine with a 3'-phosphorothioate linkage
  modified_base 3: mod_base = OTHER; note = 2'-O-methyladenosine
  modified_base 4: mod_base = OTHER; note = Pseudouridine
  modified_base 5: mod_base = OTHER; note = 2'-fluoroadenosine
  modified_base 6: mod_base = OTHER; note = 2'-O-methyladenosine
  modified_base 7: mod_base = OTHER; note = 2'-fluoroadenosine
  modified_base 8: mod_base = OTHER; note = 2'-O-methyladenosine
  modified_base 9: mod_base = gm
  modified_base 10: mod_base = OTHER; note = 2'-O-methyladenosine
  modified_base 11: mod_base = OTHER; note = Pseudouridine
  modified_base 12: mod_base = OTHER; note = Pseudouridine
  modified_base 13: mod_base = cm
  modified_base 14: mod_base = OTHER; note = 2'-fluorouridine
  modified_base 15: mod_base = um
  modified_base 16: mod_base = OTHER; note = 2'-fluoroguanosine
  modified_base 17: mod_base = gm
  modified_base 18: mod_base = OTHER; note = 2'-O-methyladenosine
  modified_base 19: mod_base = gm
  modified_base 20: mod_base = OTHER; note = 2'-O-methyluridine with a 3'-phosphorothioate linkage
  modified_base 21: mod_base = OTHER; note = 2'-O-methyluridine with a 3'-phosphorothioate linkage
  modified_base 22: mod_base = OTHER; note = 2'-O-methyluridine with a 3'-phosphorothioate linkage
  modified_base 23: mod_base = um
tganaaaaganncttggagtttt

SEQ ID NO: 565 - RNA, 23 nt, synthetic construct
  source 1..23: mol_type = other RNA
  modified_base 1: mod_base = OTHER; note = 2'-O-methyluridine with a 3'-phosphorothioate linkage
  modified_base 2: mod_base = OTHER; note = 2'-fluoroguanosine with a 3'-phosphorothioate linkage
  modified_base 3: mod_base = OTHER; note = 2'-O-methyladenosine
  modified_base 4: mod_base = um
  modified_base 5: mod_base = OTHER; note = 2'-fluoroadenosine
  modified_base 6: mod_base = OTHER; note = 2'-O-methyladenosine
  modified_base 7: mod_base = OTHER; note = 2'-fluoroadenosine
  modified_base 8: mod_base = OTHER; note = 2'-O-methyladenosine
  modified_base 9: mod_base = gm
  modified_base 10: mod_base = OTHER; note = 2'-O-methyladenosine
  modified_base 11: mod_base = OTHER; note = Pseudouridine
  modified_base 12: mod_base = OTHER; note = Pseudouridine
  modified_base 13: mod_base = cm
  modified_base 14: mod_base = OTHER; note = 2'-fluorouridine
  modified_base 15: mod_base = um
  modified_base 16: mod_base = OTHER; note = 2'-fluoroguanosine
  modified_base 17: mod_base = gm
  modified_base 18: mod_base = OTHER; note = 2'-O-methyladenosine
  modified_base 19: mod_base = gm
  modified_base 20: mod_base = OTHER; note = 2'-O-methyluridine with a 3'-phosphorothioate linkage
  modified_base 21: mod_base = OTHER; note = 2'-O-methyluridine with a 3'-phosphorothioate linkage
  modified_base 22: mod_base = OTHER; note = 2'-O-methyluridine with a 3'-phosphorothioate linkage
  modified_base 23: mod_base = um
tgataaaaganncttggagtttt

SEQ ID NO: 566 - RNA, 23 nt, synthetic construct
  source 1..23: mol_type = other RNA
  modified_base 1: mod_base = OTHER; note = 2'-O-methyluridine with a 3'-phosphorothioate linkage
  modified_base 2: mod_base = OTHER; note = 2'-fluoroguanosine with a 3'-phosphorothioate linkage
  modified_base 3: mod_base = OTHER; note = 2'-O-methyladenosine
  modified_base 4: mod_base = um
  modified_base 5: mod_base = OTHER; note = 2'-fluoroadenosine
  modified_base 6: mod_base = OTHER; note = 2'-O-methyladenosine
  modified_base 7: mod_base = OTHER; note = 2'-fluoroadenosine
  modified_base 8: mod_base = OTHER; note = 2'-O-methyladenosine
  modified_base 9: mod_base = gm
  modified_base 10: mod_base = OTHER; note = 2'-O-methyladenosine
  modified_base 11: mod_base = um
  modified_base 12: mod_base = um
  modified_base 13: mod_base = cm
  modified_base 14: mod_base = OTHER; note = 2'-fluorouridine
  modified_base 15: mod_base = um
  modified_base 16: mod_base = OTHER; note = 2'-fluoroguanosine
  modified_base 17: mod_base = gm
  modified_base 18: mod_base = OTHER; note = 2'-O-methyladenosine
  modified_base 19: mod_base = gm
  modified_base 20: mod_base = OTHER; note = 2'-O-methyluridine with a 3'-phosphorothioate linkage
  modified_base 21: mod_base = OTHER; note = 2'-O-methylguanosine with a 3'-phosphorothioate linkage
  modified_base 22: mod_base = OTHER; note = 2'-O-methyluridine with a 3'-phosphorothioate linkage
  modified_base 23: mod_base = um
tgataaaagattcttggagtgtt

SEQ ID NO: 567 - RNA, 23 nt, synthetic construct
  source 1..23: mol_type = other RNA
  modified_base 1: mod_base = OTHER; note = 2'-O-methyluridine with a 3'-phosphorothioate linkage
  modified_base 2: mod_base = OTHER; note = 2'-fluorouridine with a 3'-phosphorothioate linkage
  modified_base 3: mod_base = um
  modified_base 4: mod_base = um
  modified_base 5: mod_base = OTHER; note = 2'-fluoroadenosine
  modified_base 6: mod_base = cm
  modified_base 7: mod_base = OTHER; note = 2'-fluoroadenosine
  modified_base 8: mod_base = um
  modified_base 9: mod_base = um
  modified_base 10: mod_base = um
  modified_base 11: mod_base = um
  modified_base 12: mod_base = um
  modified_base 13: mod_base = cm
  modified_base 14: mod_base = OTHER; note = 2'-fluorouridine
  modified_base 15: mod_base = um
  modified_base 16: mod_base = OTHER; note = 2'-fluorocytidine
  modified_base 17: mod_base = um
  modified_base 18: mod_base = um
  modified_base 19: mod_base = cm
  modified_base 20: mod_base = OTHER; note = 2'-O-methylcytidine with a 3'-phosphorothioate linkage
  modified_base 21: mod_base = OTHER; note = 2'-O-methylguanosine with a 3'-phosphorothioate linkage
  modified_base 22: mod_base = OTHER; note = 2'-O-methylcytidine with a 3'-phosphorothioate linkage
  modified_base 23: mod_base = um
ttttacatttttcttcttccgct

SEQ ID NO: 568 - RNA, 22 nt, synthetic construct
  source 1..22: mol_type = other RNA
  modified_base 1: mod_base = OTHER; note = 2'-O-methyluridine with a 3'-phosphorothioate linkage
  modified_base 2: mod_base = OTHER; note = 2'-fluorouridine with a 3'-phosphorothioate linkage
  modified_base 3: mod_base = um
  modified_base 4: mod_base = um
  modified_base 5: mod_base = OTHER; note = 2'-fluoroadenosine
  modified_base 6: mod_base = cm
  modified_base 7: mod_base = OTHER; note = 2'-fluoroadenosine
  modified_base 8: mod_base = um
  modified_base 9: mod_base = um
  modified_base 10: mod_base = um
  modified_base 11: mod_base = um
  modified_base 12: mod_base = um
  modified_base 13: mod_base = cm
  modified_base 14: mod_base = OTHER; note = 2'-fluorouridine
  modified_base 15: mod_base = um
  modified_base 16: mod_base = OTHER; note = 2'-fluorocytidine
  modified_base 17: mod_base = um
  modified_base 18: mod_base = um
  modified_base 19: mod_base = OTHER; note = 2'-O-methylcytidine with a 3'-phosphorothioate linkage
  modified_base 20: mod_base = OTHER; note = 2'-O-methylcytidine with a 3'-phosphorothioate linkage
  modified_base 21: mod_base = OTHER; note = Racemic 2-propyl-o-uridine with a 3'-phosphorothioate linkage
  modified_base 22: mod_base = OTHER; note = Racemic 2-propyl-o-uridine
ttttacatttttcttcttcctt

SEQ ID NO: 569 - RNA, 23 nt, synthetic construct
  source 1..23: mol_type = other RNA
  modified_base 1: mod_base = OTHER; note = 2'-O-methyluridine with a 3'-phosphorothioate linkage and a 5'-vinylphosphate substitution
  modified_base 2: mod_base = OTHER; note = 2'-fluoroguanosine with a 3'-phosphorothioate linkage
  modified_base 3: mod_base = OTHER; note = 2'-O-methyladenosine
  modified_base 4: mod_base = gm
  modified_base 5: mod_base = OTHER; note = 2'-fluoroadenosine
  modified_base 6: mod_base = OTHER; note = 2'-O-methyladenosine
  modified_base 7: mod_base = OTHER; note = 2'-fluoroadenosine
  modified_base 8: mod_base = OTHER; note = 2'-O-methyladenosine
  modified_base 9: mod_base = um
  modified_base 10: mod_base = gm
  modified_base 11: mod_base = um
  modified_base 12: mod_base = um
  modified_base 13: mod_base = um
  modified_base 14: mod_base = OTHER; note = 2'-fluorouridine
  modified_base 15: mod_base = cm
  modified_base 16: mod_base = OTHER; note = 2'-fluorouridine
  modified_base 17: mod_base = um
  modified_base 18: mod_base = cm
  modified_base 19: mod_base = um
  modified_base 20: mod_base = OTHER; note = 2'-O-methyluridine with a 3'-phosphorothioate linkage
  modified_base 21: mod_base = OTHER; note = 2'-O-methylcytidine with a 3'-phosphorothioate linkage
  modified_base 22: mod_base = OTHER; note = 2'-O-methyladenosine with a 3'-phosphorothioate linkage
  modified_base 23: mod_base = cm
tgagaaaatgttttcttcttcac

SEQ ID NO: 570 - RNA, 23 nt, synthetic construct
  source 1..23: mol_type = other RNA
  modified_base 1: mod_base = OTHER; note = 2'-O-methyluridine with a 3'-phosphorothioate linkage and a 5'-vinylphosphate substitution
  modified_base 2: mod_base = OTHER; note = 2'-fluorouridine with a 3'-phosphorothioate linkage
  modified_base 3: mod_base = um
  modified_base 4: mod_base = um
  modified_base 5: mod_base = OTHER; note = 2'-fluoroadenosine
  modified_base 6: mod_base = cm
  modified_base 7: mod_base = OTHER; note = 2'-fluoroadenosine
  modified_base 8: mod_base = um
  modified_base 9: mod_base = um
  modified_base 10: mod_base = um
  modified_base 11: mod_base = um
  modified_base 12: mod_base = um
  modified_base 13: mod_base = cm
  modified_base 14: mod_base = OTHER; note = 2'-fluorouridine
  modified_base 15: mod_base = um
  modified_base 16: mod_base = OTHER; note = 2'-fluorocytidine
  modified_base 17: mod_base = um
  modified_base 18: mod_base = um
  modified_base 19: mod_base = cm
  modified_base 20: mod_base = OTHER; note = 2'-O-methylcytidine with a 3'-phosphorothioate linkage
  modified_base 21: mod_base = OTHER; note = 2'-O-methyluridine with a 3'-phosphorothioate linkage
  modified_base 22: mod_base = OTHER; note = 2'-O-methylcytidine with a 3'-phosphorothioate linkage
  modified_base 23: mod_base = um
ttttacatttttcttcttcctct

SEQ ID NO: 571 - RNA, 23 nt, synthetic construct
  source 1..23: mol_type = other RNA
  modified_base 1: mod_base = OTHER; note = 2'-O-methyluridine with a 3'-phosphorothioate linkage and a 5'-vinylphosphate substitution
  modified_base 2: mod_base = OTHER; note = 2'-fluoroguanosine with a 3'-phosphorothioate linkage
  modified_base 3: mod_base = OTHER; note = 2'-O-methyladenosine
  modified_base 4: mod_base = um
  modified_base 5: mod_base = OTHER; note = 2'-fluoroadenosine
  modified_base 6: mod_base = OTHER; note = 2'-O-methyladenosine
  modified_base 7: mod_base = OTHER; note = 2'-fluoroadenosine
  modified_base 8: mod_base = OTHER; note = 2'-O-methyladenosine
  modified_base 9: mod_base = gm
  modified_base 10: mod_base = OTHER; note = 2'-O-methyladenosine
  modified_base 11: mod_base = um
  modified_base 12: mod_base = um
  modified_base 13: mod_base = cm
  modified_base 14: mod_base = OTHER; note = 2'-fluorouridine
  modified_base 15: mod_base = um
  modified_base 16: mod_base = OTHER; note = 2'-fluoroguanosine
  modified_base 17: mod_base = gm
  modified_base 18: mod_base = OTHER; note = 2'-O-methyladenosine
  modified_base 19: mod_base = gm
  modified_base 20: mod_base = OTHER; note = 2'-O-methyluridine with a 3'-phosphorothioate linkage
  modified_base 21: mod_base = OTHER; note = 2'-O-methyluridine with a 3'-phosphorothioate linkage
  modified_base 22: mod_base = OTHER; note = 2'-O-methylguanosine with a 3'-phosphorothioate linkage
  modified_base 23: mod_base = gm
tgataaaagattcttggagttgg

SEQ ID NO: 572 - RNA, 23 nt, synthetic construct
  source 1..23: mol_type = other RNA
  modified_base 1: mod_base = OTHER; note = 2'-O-methyluridine with a 3'-phosphorothioate linkage and a 5'-vinylphosphate substitution
  modified_base 2: mod_base = OTHER; note = 2'-fluoroadenosine with a 3'-phosphorothioate linkage
  modified_base 3: mod_base = um
  modified_base 4: mod_base = OTHER; note = 2'-O-methyladenosine
  modified_base 5: mod_base = OTHER; note = 2'-fluoroadenosine
  modified_base 6: mod_base = OTHER; note = 2'-O-methyladenosine
  modified_base 7: mod_base = OTHER; note = 2'-fluoroadenosine
  modified_base 8: mod_base = gm
  modified_base 9: mod_base = OTHER; note = 2'-O-methyladenosine
  modified_base 10: mod_base = um
  modified_base 11: mod_base = um
  modified_base 12: mod_base = cm
  modified_base 13: mod_base = um
  modified_base 14: mod_base = OTHER; note = 2'-fluorouridine
  modified_base 15: mod_base = gm
  modified_base 16: mod_base = OTHER; note = 2'-fluoroguanosine
  modified_base 17: mod_base = OTHER; note = 2'-O-methyladenosine
  modified_base 18: mod_base = gm
  modified_base 19: mod_base = um
  modified_base 20: mod_base = OTHER; note = 2'-O-methyluridine with a 3'-phosphorothioate linkage
  modified_base 21: mod_base = OTHER; note = 2'-O-methyluridine with a 3'-phosphorothioate linkage
  modified_base 22: mod_base = OTHER; note = 2'-O-methyluridine with a 3'-phosphorothioate linkage
  modified_base 23: mod_base = gm
tataaaagattcttggagttttg

SEQ ID NO: 573 - RNA, 23 nt, synthetic construct
  source 1..23: mol_type = other RNA
  modified_base 1: mod_base = OTHER; note = 2'-O-methyluridine with a 3'-phosphorothioate linkage and a 5'-vinylphosphate substitution
  modified_base 2: mod_base = OTHER; note = 2'-fluorouridine with a 3'-phosphorothioate linkage
  modified_base 3: mod_base = um
  modified_base 4: mod_base = cm
  modified_base 5: mod_base = OTHER; note = 2'-fluoroguanosine
  modified_base 6: mod_base = OTHER; note = 2'-O-methyladenosine
  modified_base 7: mod_base = OTHER; note = 2'-fluoroadenosine
  modified_base 8: mod_base = gm
  modified_base 9: mod_base = OTHER; note = 2'-O-methyladenosine
  modified_base 10: mod_base = OTHER; note = 2'-O-methyladenosine
  modified_base 11: mod_base = OTHER; note = 2'-O-methyladenosine
  modified_base 12: mod_base = um
  modified_base 13: mod_base = OTHER; note = 2'-O-methyladenosine
  modified_base 14: mod_base = OTHER; note = 2'-fluorouridine
  modified_base 15: mod_base = OTHER; note = 2'-O-methyladenosine
  modified_base 16: mod_base = OTHER; note = 2'-fluoroadenosine
  modified_base 17: mod_base = gm
  modified_base 18: mod_base = cm
  modified_base 19: mod_base = OTHER; note = 2'-O-methyladenosine
  modified_base 20: mod_base = OTHER; note = 2'-O-methyladenosine with a 3'-phosphorothioate linkage
  modified_base 21: mod_base = OTHER; note = 2'-O-methyluridine with a 3'-phosphorothioate linkage
  modified_base 22: mod_base = OTHER; note = 2'-O-methyluridine with a 3'-phosphorothioate linkage
  modified_base 23: mod_base = cm
tttcgaagaaatataagcaattc

SEQ ID NO: 574 - RNA, 23 nt, synthetic construct
  source 1..23: mol_type = other RNA
  modified_base 1: mod_base = OTHER; note = 2'-O-methyluridine with a 3'-phosphorothioate linkage and a 5'-vinylphosphate substitution
  modified_base 2: mod_base = OTHER; note = 2'-fluorocytidine with a 3'-phosphorothioate linkage
  modified_base 3: mod_base = um
  modified_base 4: mod_base = um
  modified_base 5: mod_base = OTHER; note = 2'-fluoroguanosine
  modified_base 6: mod_base = OTHER; note = 2'-O-methyladenosine
  modified_base 7: mod_base = OTHER; note = 2'-fluoroadenosine
  modified_base 8: mod_base = OTHER; note = 2'-O-methyladenosine
  modified_base 9: mod_base = um
  modified_base 10: mod_base = OTHER; note = 2'-O-methyladenosine
  modified_base 11: mod_base = OTHER; note = 2'-O-methyladenosine
  modified_base 12: mod_base = gm
  modified_base 13: mod_base = gm
  modified_base 14: mod_base = OTHER; note = 2'-fluorouridine
  modified_base 15: mod_base = OTHER; note = 2'-O-methyladenosine
  modified_base 16: mod_base = OTHER; note = 2'-fluorouridine
  modified_base 17: mod_base = OTHER; note = 2'-O-methyladenosine
  modified_base 18: mod_base = cm
  modified_base 19: mod_base = OTHER; note = 2'-O-methyladenosine
  modified_base 20: mod_base = OTHER; note = 2'-O-methyluridine with a 3'-phosphorothioate linkage
  modified_base 21: mod_base = OTHER; note = 2'-O-methyladenosine with a 3'-phosphorothioate linkage
  modified_base 22: mod_base = OTHER; note = 2'-O-methyladenosine with a 3'-phosphorothioate linkage
  modified_base 23: mod_base = cm
tcttgaaataaggtatacataac

SEQ ID NO: 575 - RNA, 23 nt, synthetic construct
  source 1..23: mol_type = other RNA
  modified_base 1: mod_base = OTHER; note = 2'-O-methyluridine with a 3'-phosphorothioate linkage and a 5'-vinylphosphate substitution
  modified_base 2: mod_base = OTHER; note = 2'-fluorocytidine with a 3'-phosphorothioate linkage
  modified_base 3: mod_base = OTHER; note = 2'-O-methyladenosine
  modified_base 4: mod_base = um
  modified_base 5: mod_base = OTHER; note = 2'-fluoroadenosine
  modified_base 6: mod_base = OTHER; note = 2'-O-methyladenosine
  modified_base 7: mod_base = OTHER; note = 2'-fluoroguanosine
  modified_base 8: mod_base = um
  modified_base 9: mod_base = um
  modified_base 10: mod_base = um
  modified_base 11: mod_base = gm
  modified_base 12: mod_base = OTHER; note = 2'-O-methyladenosine
  modified_base 13: mod_base = OTHER; note = 2'-O-methyladenosine
  modified_base 14: mod_base = OTHER; note = 2'-fluorouridine
  modified_base 15: mod_base = gm
  modified_base 16: mod_base = OTHER; note = 2'-fluoroadenosine
  modified_base 17: mod_base = um
  modified_base 18: mod_base = um
  modified_base 19: mod_base = cm
  modified_base 20: mod_base = OTHER; note = 2'-O-methyluridine with a 3'-phosphorothioate linkage
  modified_base 21: mod_base = OTHER; note = 2'-O-methyluridine with a 3'-phosphorothioate linkage
  modified_base 22: mod_base = OTHER; note = 2'-O-methyluridine with a 3'-phosphorothioate linkage
  modified_base 23: mod_base = cm
tcataagtttgaatgattctttc

SEQ ID NO: 576 - RNA, 23 nt, synthetic construct
  source 1..23: mol_type = other RNA
  modified_base 1: mod_base = OTHER; note = 2'-O-methyluridine with a 3'-phosphorothioate linkage and a 5'-vinylphosphate substitution
  modified_base 2: mod_base = OTHER; note = 2'-fluorouridine with a 3'-phosphorothioate linkage
  modified_base 3: mod_base = OTHER; note = 2'-O-methyladenosine
  modified_base 4: mod_base = um
  modified_base 5: mod_base = OTHER; note = 2'-fluorouridine
  modified_base 6: mod_base = OTHER; note = 2'-O-methyladenosine
  modified_base 7: mod_base = OTHER; note = 2'-fluoroadenosine
  modified_base 8: mod_base = um
  modified_base 9: mod_base = gm
  modified_base 10: mod_base = OTHER; note = 2'-O-methyladenosine
  modified_base 11: mod_base = gm
  modified_base 12: mod_base = um
  modified_base 13: mod_base = cm
  modified_base 14: mod_base = OTHER; note = 2'-fluoroadenosine
  modified_base 15: mod_base = um
  modified_base 16: mod_base = OTHER; note = 2'-fluoroadenosine
  modified_base 17: mod_base = cm
  modified_base 18: mod_base = um
  modified_base 19: mod_base = cm
  modified_base 20: mod_base = OTHER; note = 2'-O-methyluridine with a 3'-phosphorothioate linkage
  modified_base 21: mod_base = OTHER; note = 2'-O-methyluridine with a 3'-phosphorothioate linkage
  modified_base 22: mod_base = OTHER; note = 2'-O-methylcytidine with a 3'-phosphorothioate linkage
  modified_base 23: mod_base = um
ttattaatgagtcatactcttct

SEQ ID NO: 577 - RNA, 21 nt, synthetic construct
  source 1..21: mol_type = other RNA
  modified_base 1: mod_base = OTHER; note = 2'-O-methyladenosine with a 3'-phosphorothioate linkage and a 5' inverted abasic moiety connected via a 5' to 5' phosphorothioate linkage
  modified_base 2: mod_base = gm
  modified_base 3: mod_base = gm
  modified_base 4: mod_base = OTHER; note = 2'-O-methyladenosine
  modified_base 5: mod_base = OTHER; note = 2'-O-methyladenosine
  modified_base 6: mod_base = gm
  modified_base 7: mod_base = OTHER; note = 2'-O-methyladenosine
  modified_base 8: mod_base = OTHER; note = 2'-O-methyladenosine
  modified_base 9: mod_base = OTHER; note = 2'-fluoroguanosine
  modified_base 10: mod_base = OTHER; note = 2'-fluoroadenosine
  modified_base 11: mod_base = OTHER; note = 2'-fluoroadenosine
  modified_base 12: mod_base = OTHER; note = 2'-O-methyladenosine
  modified_base 13: mod_base = OTHER; note = 2'-O-methyladenosine
  modified_base 14: mod_base = OTHER; note = 2'-O-methyladenosine
  modified_base 15: mod_base = um
  modified_base 16: mod_base = OTHER; note = 2'-O-hexadecyl guanosine
  modified_base 17: mod_base = um
  modified_base 18: mod_base = OTHER; note = 2'-O-methyladenosine
  modified_base 19: mod_base = OTHER; note = 2'-O-methyladenosine with a 3'-phosphorothioate linkage
  modified_base 20: mod_base = OTHER; note = 2'-O-methyladenosine with a 3'-phosphorothioate linkage
  modified_base 21: mod_base = OTHER; note = 2'-O-methyladenosine
aggaagaagaaaaatgtaaaa

SEQ ID NO: 578 - RNA, 21 nt, synthetic construct
  source 1..21: mol_type = other RNA
  modified_base 1: mod_base = OTHER; note = 2'-O-methylguanosine with a 3'-phosphorothioate linkage and a 5' inverted abasic moiety connected via a 5' to 5' phosphorothioate linkage
  modified_base 2: mod_base = OTHER; note = 2'-O-methyladenosine
  modified_base 3: mod_base = OTHER; note = 2'-O-methyladenosine
  modified_base 4: mod_base = gm
  modified_base 5: mod_base = OTHER; note = 2'-O-methyladenosine
  modified_base 6: mod_base = OTHER; note = 2'-O-methyladenosine
  modified_base 7: mod_base = gm
  modified_base 8: mod_base = OTHER; note = 2'-O-methyladenosine
  modified_base 9: mod_base = OTHER; note = 2'-fluoroadenosine
  modified_base 10: mod_base = OTHER; note = 2'-fluoroadenosine
  modified_base 11: mod_base = OTHER; note = 2'-fluoroadenosine
  modified_base 12: mod_base = cm
  modified_base 13: mod_base = OTHER; note = 2'-O-methyladenosine
  modified_base 14: mod_base = um
  modified_base 15: mod_base = um
  modified_base 16: mod_base = OTHER; note = 2'-O-hexadecy uridine
  modified_base 17: mod_base = um
  modified_base 18: mod_base = cm
  modified_base 19: mod_base = OTHER; note = 2'-O-methyluridine with a 3'-phosphorothioate linkage
  modified_base 20: mod_base = OTHER; note = 2'-O-methylcytidine with a 3'-phosphorothioate linkage
  modified_base 21: mod_base = OTHER; note = 2'-O-methyladenosine
gaagaagaaaacattttctca

SEQ ID NO: 579 - RNA, 21 nt, synthetic construct
  source 1..21: mol_type = other RNA
  modified_base 1: mod_base = OTHER; note = 2'-O-methyladenosine with a 3'-phosphorothioate linkage and a 5' inverted abasic moiety connected via a 5' to 5' phosphorothioate linkage
  modified_base 2: mod_base = OTHER; note = 2'-O-methyladenosine
  modified_base 3: mod_base = cm
  modified_base 4: mod_base = um
  modified_base 5: mod_base = cm
  modified_base 6: mod_base = cm
  modified_base 7: mod_base = OTHER; note = 2'-O-methyladenosine
  modified_base 8: mod_base = OTHER; note = 2'-O-methyladenosine
  modified_base 9: mod_base = OTHER; note = 2'-fluoroguanosine
  modified_base 10: mod_base = OTHER; note = 2'-fluoroadenosine
  modified_base 11: mod_base = OTHER; note = 2'-fluoroadenosine
  modified_base 12: mod_base = um
  modified_base 13: mod_base = cm
  modified_base 14: mod_base = um
  modified_base 15: mod_base = um
  modified_base 16: mod_base = OTHER; note = 2'-O-hexadecyl uridine
  modified_base 17: mod_base = um
  modified_base 18: mod_base = OTHER; note = 2'-O-methyladenosine
  modified_base 19: mod_base = OTHER; note = 2'-O-methyluridine with a 3'-phosphorothioate linkage
  modified_base 20: mod_base = OTHER; note = 2'-O-methylcytidine with a 3'-phosphorothioate linkage
  modified_base 21: mod_base = OTHER; note = 2'-O-methyladenosine
aactccaagaatcttttatca

SEQ ID NO: 580 - RNA, 21 nt, synthetic construct
  source 1..21: mol_type = other RNA
  modified_base 1: mod_base = OTHER; note = 2'-O-methyladenosine with a 3'-phosphorothioate linkage and a 5' inverted abasic moiety connected via a 5' to 5' phosphorothioate linkage
  modified_base 2: mod_base = OTHER; note = 2'-O-methyladenosine
  modified_base 3: mod_base = OTHER; note = 2'-O-methyladenosine
  modified_base 4: mod_base = cm
  modified_base 5: mod_base = um
  modified_base 6: mod_base = cm
  modified_base 7: mod_base = cm
  modified_base 8: mod_base = OTHER; note = 2'-O-methyladenosine
  modified_base 9: mod_base = OTHER; note = 2'-fluoroadenosine
  modified_base 10: mod_base = OTHER; note = 2'-fluoroguanosine
  modified_base 11: mod_base = OTHER; note = 2'-fluoroadenosine
  modified_base 12: mod_base = OTHER; note = 2'-O-methyladenosine
  modified_base 13: mod_base = um
  modified_base 14: mod_base = cm
  modified_base 15: mod_base = um
  modified_base 16: mod_base = OTHER; note = 2'-O-hexadecyl uridine
  modified_base 17: mod_base = um
  modified_base 18: mod_base = um
  modified_base 19: mod_base = OTHER; note = 2'-O-methyladenosine with a 3'-phosphorothioate linkage
  modified_base 20: mod_base = OTHER; note = 2'-O-methyluridine with a 3'-phosphorothioate linkage
  modified_base 21: mod_base = OTHER; note = 2'-O-methyladenosine
aaactccaagaatcttttata

SEQ ID NO: 581 - RNA, 21 nt, synthetic construct
  source 1..21: mol_type = other RNA
  modified_base 1: mod_base = OTHER; note = 2'-O-methyladenosine with a 3'-phosphorothioate linkage and a 5' inverted abasic moiety connected via a 5' to 5' phosphorothioate linkage
  modified_base 2: mod_base = um
  modified_base 3: mod_base = um
  modified_base 4: mod_base = gm
  modified_base 5: mod_base = cm
  modified_base 6: mod_base = um
  modified_base 7: mod_base = um
  modified_base 8: mod_base = OTHER; note = 2'-O-methyladenosine
  modified_base 9: mod_base = OTHER; note = 2'-fluorouridine
  modified_base 10: mod_base = OTHER; note = 2'-fluoroadenosine
  modified_base 11: mod_base = OTHER; note = 2'-fluorouridine
  modified_base 12: mod_base = um
  modified_base 13: mod_base = um
  modified_base 14: mod_base = cm
  modified_base 15: mod_base = um
  modified_base 16: mod_base = OTHER; note = 2'-O-hexadecyl uridine
  modified_base 17: mod_base = cm
  modified_base 18: mod_base = gm
  modified_base 19: mod_base = OTHER; note = 2'-O-methyladenosine with a 3'-phosphorothioate linkage
  modified_base 20: mod_base = OTHER; note = 2'-O-methyladenosine with a 3'-phosphorothioate linkage
  modified_base 21: mod_base = OTHER; note = 2'-O-methyladenosine
attgcttatatttcttcgaaa

SEQ ID NO: 582 - RNA, 21 nt, synthetic construct
  source 1..21: mol_type = other RNA
  modified_base 1: mod_base = OTHER; note = 2'-O-methyluridine with a 3'-phosphorothioate linkage and a 5' inverted abasic moiety connected via a 5' to 5' phosphorothioate linkage
  modified_base 2: mod_base = OTHER; note = 2'-O-methyladenosine
  modified_base 3: mod_base = um
  modified_base 4: mod_base = gm
  modified_base 5: mod_base = um
  modified_base 6: mod_base = OTHER; note = 2'-O-methyladenosine
  modified_base 7: mod_base = um
  modified_base 8: mod_base = OTHER; note = 2'-O-methyladenosine
  modified_base 9: mod_base = OTHER; note = 2'-fluorocytidine
  modified_base 10: mod_base = OTHER; note = 2'-fluorocytidine
  modified_base 11: mod_base = OTHER; note = 2'-fluorouridine
  modified_base 12: mod_base = um
  modified_base 13: mod_base = OTHER; note = 2'-O-methyladenosine
  modified_base 14: mod_base = um
  modified_base 15: mod_base = um
  modified_base 16: mod_base = OTHER; note = 2'-O-hexadecyl uridine
  modified_base 17: mod_base = cm
  modified_base 18: mod_base = OTHER; note = 2'-O-methyladenosine
  modified_base 19: mod_base = OTHER; note = 2'-O-methyladenosine with a 3'-phosphorothioate linkage
  modified_base 20: mod_base = OTHER; note = 2'-O-methylguanosine with a 3'-phosphorothioate linkage
  modified_base 21: mod_base = OTHER; note = 2'-O-methyladenosine
tatgtataccttatttcaaga

SEQ ID NO: 583 - RNA, 21 nt, synthetic construct
  source 1..21: mol_type = other RNA
  modified_base 1: mod_base = OTHER; note = 2'-O-methyladenosine with a 3'-phosphorothioate linkage and a 5' inverted abasic moiety connected via a 5' to 5' phosphorothioate linkage
  modified_base 2: mod_base = OTHER; note = 2'-O-methyladenosine
  modified_base 3: mod_base = gm
  modified_base 4: mod_base = OTHER; note = 2'-O-methyladenosine
  modified_base 5: mod_base = OTHER; note = 2'-O-methyladenosine
  modified_base 6: mod_base = um
  modified_base 7: mod_base = cm
  modified_base 8: mod_base = OTHER; note = 2'-O-methyladenosine
  modified_base 9: mod_base = OTHER; note = 2'-fluorouridine
  modified_base 10: mod_base = OTHER; note = 2'-fluorouridine
  modified_base 11: mod_base = OTHER; note = 2'-fluorocytidine
  modified_base 12: mod_base = OTHER; note = 2'-O-methyladenosine
  modified_base 13: mod_base = OTHER; note = 2'-O-methyladenosine
  modified_base 14: mod_base = OTHER; note = 2'-O-methyladenosine
  modified_base 15: mod_base = cm
  modified_base 16: mod_base = OTHER; note = 2'-O-hexadecyl uridine
  modified_base 17: mod_base = um
  modified_base 18: mod_base = OTHER; note = 2'-O-methyladenosine
  modified_base 19: mod_base = OTHER; note = 2'-O-methyluridine with a 3'-phosphorothioate linkage
  modified_base 20: mod_base = OTHER; note = 2'-O-methylguanosine with a 3'-phosphorothioate linkage
  modified_base 21: mod_base = OTHER; note = 2'-O-methyladenosine
aagaatcattcaaacttatga

SEQ ID NO: 584 - RNA, 21 nt, synthetic construct
  source 1..21: mol_type = other RNA
  modified_base 1: mod_base = OTHER; note = 2'-O-methyladenosine with a 3'-phosphorothioate linkage and a 5' inverted abasic moiety connected via a 5' to 5' phosphorothioate linkage
  modified_base 2: mod_base = OTHER; note = 2'-O-methyladenosine
  modified_base 3: mod_base = gm
  modified_base 4: mod_base = OTHER; note = 2'-O-methyladenosine
  modified_base 5: mod_base = gm
  modified_base 6: mod_base = um
  modified_base 7: mod_base = OTHER; note = 2'-O-methyladenosine
  modified_base 8: mod_base = um
  modified_base 9: mod_base = OTHER; note = 2'-fluoroguanosine
  modified_base 10: mod_base = OTHER; note = 2'-fluoroadenosine
  modified_base 11: mod_base = OTHER; note = 2'-fluorocytidine
  modified_base 12: mod_base = um
  modified_base 13: mod_base = cm
  modified_base 14: mod_base = OTHER; note = 2'-O-methyladenosine
  modified_base 15: mod_base = um
  modified_base 16: mod_base = OTHER; note = 2'-O-hexadecyl uridine
  modified_base 17: mod_base = OTHER; note = 2'-O-methyladenosine
  modified_base 18: mod_base = OTHER; note = 2'-O-methyladenosine
  modified_base 19: mod_base = OTHER; note = 2'-O-methyluridine with a 3'-phosphorothioate linkage
  modified_base 20: mod_base = OTHER; note = 2'-O-methyladenosine with a 3'-phosphorothioate linkage
  modified_base 21: mod_base = OTHER; note = 2'-O-methyladenosine
aagagtatgactcattaataa